(19) United States
(12) Patent Application Publication
(10) Pub. No.: US 2023/0364226 A1
(43) Pub. Date: Nov. 16, 2023

(54) RNA CONSTRUCT

(71) Applicants: Imperial College Innovations Limited, London (GB); VaxEquity Ltd, Little Chesterford (GB)

(72) Inventors: Robin Shattock, London (GB); Paul McKay, London (GB); Michael Watson, Little Chesterford (GB); Elaine Harper, Little Chesterford (GB)

(73) Assignees: Imperial College Innovations Limited, London (GB); VaxEquity Ltd, Little Chesterford, ES (GB)

(21) Appl. No.: 18/257,548

(22) PCT Filed: Dec. 17, 2021
(86) PCT No.: PCT/GB2021/053362

§ 371 Date: Jun. 14, 2023

(30) Foreign Application Priority Data
Dec. 17, 2020 (GB) 2020061.4

(51) Int. Cl. A61K 39/39; C12N 15/86; C07K 14/005

(52) U.S. Cl. CPC A61K 39/39; C12N 15/86; C07K 14/005; A61K 2039/53

(57) ABSTRACT

The invention relates to RNA constructs, and particularly, although not exclusively, to mRNA constructs and saRNA replicons and to nucleic acids and expression vectors encoding such RNA constructs. The invention extends to the use of such RNA constructs in therapy, for example in treating diseases and/or in vaccine delivery. The invention extends to pharmaceutical compositions comprising such RNA constructs, and methods and uses thereof.

[0001] The present invention relates to RNA constructs, and particularly, although not exclusively, to mRNA constructs and saRNA replicons and to nucleic acids and expression vectors encoding such RNA constructs. The invention extends to the use of such RNA constructs in therapy, for example in treating diseases and/or in vaccine delivery. The invention extends to pharmaceutical compositions comprising such RNA constructs, and methods and uses thereof.

[0002] Messenger RNA (mRNA) is a promising tool for biotherapeutics. However, while mRNA therapeutics have been shown to be highly effective in small animals, the outcomes do not scale linearly when these formulations are translated in dose-escalation studies in humans. Furthermore, adverse events associated with the induction of interferon responses have been rate-limiting with respect to the increased doses of RNA likely to be effective in humans. The reason for this inconsistency is unclear, but the inventors hypothesize that inherent differences in human innate sensing pose a barrier to the translation of RNA therapeutics from the lab to the clinic.

[0003] Furthermore, innate sensing of RNA has been associated with the inhibition of protein expression. To date, the main approach to overcoming the innate recognition of exogenous RNA has been to use modified ribonucleotides that are less detectable by innate sensing mechanisms. However, modified mRNA is not completely undetectable, and still results in some induction of interferon production, protein silencing and reduced tolerability for human use (see FIG. 2).

[0004] Another approach has been the use of self-amplifying or saRNA vectors, which are typically based on an alphavirus backbone that have the capacity to self-amplify their own RNA by encoding polymerase activity within their non-structural proteins. Prior art methods have involved replacing the structural proteins of these vectors by a gene of interest (GOI), for example encoding an antigen of interest be it a vaccine construct, or encoding a therapeutic protein. Other versions of saRNA have been based on picornaviruses, flaviviruses, and coronaviruses. When saRNA is taken up into the cytoplasm of target cells, this leads to amplification of the RNA by the encoded polymerase machinery and very high expression levels of the GOI. As a consequence, saRNA has been shown to induce immune responses with lower doses of saRNA than mRNA (10- to 100-fold lower) and results in prolonged protein expression for up to 60 days in mice.

[0005] However, as shown in FIG. 3, a drawback with saRNA is that it is also sensed by innate sensing pattern recognition receptors, triggering antiviral (interferon) responses that limit protein expression and self-amplification of these prior art saRNAs. Innate sensing of saRNA differs to that of mRNA due to its large size (typically >5000 bases) and profound secondary structure, including double stranded regions (dsRNA). Long and double stranded RNA triggers innate responses through amongst other sensors, the MDA5 ((Melanoma Differentiation-Associated protein 5) pathway. This is facilitated by the binding of PACT (PKR activating protein) to long and dsRNA RNA promoting the oligomerization of MDA5 and subsequent triggering of a down-stream signalling cascade that inhibits replication and expression of saRNA.

[0006] Accordingly, there is a need in the art to produce new means by which RNA therapeutics, be they mRNA- or saRNA-based, can be delivered and expressed in patients, such that they are able to overcome the innate immune system sensing.

[0007] The inventors have developed novel RNA constructs (saRNA and mRNA) that advantageously overcome the innate immune system which senses RNA, by expressing viral immune inhibitor proteins that block or reduce the activity of immune system machinery, resulting in improved translation (in the case of mRNA) and increased self-amplification and subsequent translation (in the case of saRNA systems), and therefore greater protein expression levels of the gene of interest, such as an antigen, in a host cell.

[0008] Accordingly, in a first aspect of the invention, there is provided an RNA construct encoding: (i) at least one therapeutic biomolecule; and (ii) at least one viral innate inhibitor protein (IIP).

[0009] RNA constructs, such as mRNA and saRNA replicons, have been postulated to be potential tools for the delivery and expression of genes of interest for vaccines and therapeutics. However, single stranded mRNA (ssRNA) and double stranded RNA (dsRNA) is detected intracellularly by innate sensing mechanisms that trigger responses, which inhibit protein translation. As a consequence, expression of genes of interest encoded by the RNA construct is significantly impaired and thus the immunogenic or therapeutic potential of RNA constructs, including saRNA and mRNA, is limited. Advantageously, the RNA constructs of the invention overcome this problem because they encode one or more viral innate inhibitor protein (IIP), which reduces or ablates the downstream innate inhibition of transgene expression within the host cell.

[0010] The induction of interferon is one downstream consequence of innate recognition, but it will be appreciated that other molecules and pathways can and are induced, as discussed below, and any of these will be inhibited by the one or more viral innate immunity inhibitor protein that is harboured on the RNA construct. Preferably, therefore, the at least one innate inhibitor protein (IIP) is capable of inhibiting the innate immune response to RNA in a subject treated with the RNA construct of the invention. The IIP can therefore be described as an inhibitor of innate immunity. It may also be described as an interferon inhibiting molecule in some embodiments.

[0011] One previously published approach to ablating the interferon response with saRNA used interferon inhibiting proteins from the vaccinia virus, E3, K3 and B18. However, in that study, the interferon inhibiting proteins were delivered and formulated as separate mRNA molecules that were combined with the saRNA. This requires the manufacture of both saRNA and mRNA, and necessitated the use of at least 3-6 times as much vaccinia mRNA as the saRNA replicon construct according to the invention to provide any observable enhancement in protein expression.

[0012] Advantageously, the presence, in the RNA construct of the first aspect, of one or more viral innate inhibitor protein, enables dual protein expression with the biotherapeutic molecule, i.e. a peptide or protein of interest. As opposed to delivering two different strands of RNA as described in the prior art, one encoding the peptide/protein of interest and one encoding the innate modulatory protein, when using the RNA construct of the invention, only one single strand is delivered to the target cell, thereby ensuring colocalization of the RNA molecule and the viral immune inhibitor protein.

[0013] The viral immune inhibitor protein inhibits the innate sensing of RNA in the host cell, thereby enabling higher protein expression and translation, and the viral immune inhibitor protein expression itself is co-expressed and translated from the same RNA molecule as the therapeutic biomolecule.

[0014] As described in the examples, the RNA constructs of the invention (also known as “Stealthicons”) encoding luciferase or VEGF-A (as a GOI) have surprisingly been shown to increase luciferase or VEGF-A protein expression levels by up to 12-fold in a human cell line with intact innate sensing systems in vitro. The skilled person would readily appreciate that the luciferase reporter is truly representative of the therapeutic biomolecule described herein (i.e. the GOI), because it proves that the RNA construct is able to express the gene harboured on the RNA molecule of the invention. As such, the luciferase provides robust evidence of the proof of concept that the RNA construct of the invention can be used to express any therapeutically active biomolecule. In addition, VEGF-A (see FIG. 11) represents an alternative exemplar to luciferase as the GOI.

[0015] The RNA construct of the first aspect may be single-stranded RNA or double-stranded RNA.

[0016] The RNA construct may comprise a mRNA molecule or a saRNA molecule.

[0017] In one embodiment, the RNA construct comprises mRNA. FIG. 1 (right hand side) illustrates various embodiments of the RNA construct as a mRNA molecule.

[0018] In a preferred embodiment, however, the RNA construct comprises self-amplifying RNA (saRNA). FIG. 1 (left hand side) illustrates various embodiments of the RNA construct as a saRNA molecule. The skilled person would understand that such an RNA construct can also be referred to as a self-replicating RNA virus vector, or an RNA replicon.

[0019] Preferably, the saRNA construct comprises or is derived from a positive stranded RNA virus selected from the group of genus consisting of: alphavirus; picornavirus; flavivirus; rubivirus; pestivirus; hepacivirus; calicivirus and coronavirus.

[0020] Preferably, the RNA construct comprises or is derived from an alphavirus. Suitable wild-type alphavirus sequences are well-known. Representative examples of suitable alphaviruses include Aura, Bebaru virus, Cabassou, Chikungunya virus, Eastern equine encephalomyelitis virus, Fort Morgan, Getah virus, Kyzylagach, Mayaro, Mayaro virus, Middleburg, Mucambo virus, Ndumu, Pixuna virus, Ross River virus, Semliki Forest, Sindbis virus, Tonate, Triniti, Una, Venezuelan equine encephalomyelitis, Western equine encephalomyelitis, Whataroa, and Y-62-33. Preferably, therefore, the RNA construct comprises or is derived from any of these alphaviruses.

[0021] Preferably, the RNA construct comprises or is derived from a virus selected from the group of species consisting of: Venezuelan Equine Encephalitis Virus (VEEV); enterovirus 71; Encephalomyocarditis virus; Kunjin virus; and Middle East respiratory syndrome virus. In one preferred embodiment, the RNA construct comprises or is derived from Kunjin virus. Preferably, the RNA construct comprises or is derived from VEEV.

[0022] Preferably, the RNA construct comprises a nucleotide sequence, which encodes the at least one innate inhibitor protein (IIP), which is capable of reducing, ablating or blocking the innate immune response to RNA. The IIP is, therefore, an inhibitor of innate immunity, and can therefore be described as a viral innate immunity inhibitor protein. The IIP may also be an inhibitor of interferon signalling.

[0023] The reduction, ablation or blocking of the innate immune response to RNA in a host cell transformed with that RNA molecule (i.e. non-endogenously produced RNA) may be achieved by the IIP regulating interferon production, inhibiting innate signalling pathways, and/or inhibiting RNA recognition. It will be appreciated that regulation of interferon production could be described as inhibiting innate signalling. Therefore, innate sensing and innate signalling systems include: (a) RNA recognition systems, (b) pathways leading to interferon production and resulting in stimulation of interferon-stimulated genes, and (c) interferon signalling systems.

[0024] The IIP may, therefore, fall into any of the following four broad categories:—
[0025] (i) Category 1: Inhibitors of interferon regulatory factor activity;
[0026] (ii) Category 2: Inhibitors of pathways leading to interferon production and resulting in stimulation of interferon-stimulated genes;
[0027] (iii) Category 3: Inhibitors of interferon signalling; and/or
[0028] (iv) Category 4: Inhibitors of RNA recognition systems.

[0029] It will be appreciated that some IIPs may have multiple actions. For instance, a Category 4 IIP may also be classified as a Category 2 IIP (e.g. IRF3, IRF7) and a Category 3 IIP (e.g. IRF9).

[0030] In one embodiment, the reduction, ablation or blocking of the innate immune response to RNA is preferably achieved by the IIP by reducing or preventing the recognition of cytosolic RNA by pattern recognition receptors leading to activation of interferon regulatory factor 3 and 7 (IRF3 and IRF7) and NF-κB transcription factors, directly triggering a range of antiviral genes (e.g. IFIT1-3, Mx1, Mx2 known to suppress RNA expression), proinflammatory genes whose products orchestrate the innate immune response, and direct activation of canonically IFN-stimulated genes (ISGs) upstream of any interferon dependent cascade. These pathways may be enhanced by the induction of type I & III interferons that provide a positive feedback loop further amplifying many antiviral responses.

[0031] The at least one IIP may be derived from a herpes simplex virus. The IIP may be derived from a hepatitis virus, optionally a hepatitis C virus. The IIP may be derived from a vaccinia virus. The IIP may be derived from a coronavirus, optionally Middle East Respiratory Syndrome (MERS) virus or Severe Acute Respiratory Syndrome (SARS) virus. The SARS virus may be SARS-Cov or SARS-CoV-2. The IIP may be derived from a Karposi's sarcoma-associated herpesvirus (KSHV). The IIP may be derived from an Ebola virus.

[0032] The at least one innate inhibitor protein (IIP) may be selected from a group of viral IIPs consisting of: HPV16 E6; HSV ICP34.5; HCV E2; HCV NS5a; VACV E3L; VACV K3L; MERS ORF8B; KSHV ORF52; EBOV VP35; SARS-2 ORF3b and VACV C6 or an orthologue thereof. It will be appreciated that these IIPs can bring about inhibition of innate signalling systems leading to IFN production.

[0033] In one embodiment, the at least one IIP may be HPV16 E6 (human papillomavirus E6; NP_041325.1; Accession Number—NCBI Reference Sequence: NC_001526.4; UniProtKB—P03126 (VE6_HPV16)), or an orthologue thereof. This protein is believed to prevent the establishment of a cellular antiviral state by acting on multiple proteins within the innate signalling cascade including PKR, IRF3 and IRF9. Westrich J A, Warren C J, Pyeon D. (2017). Evasion of host immune defenses by human papillomavirus. Virus Res. 2017 231, 21-33. doi: 10.1016/j.virusres.2016.11.023. Noguchi T, Satoh, S, Noshi T, Hatada E, Fukuda R, Kawai A, Ikeda S, Hijikata M. Shimotohno K (2001), Effects of Mutation in Hepatitis C Virus Nonstructural Protein 5A on Interferon Resistance Mediated by Inhibition of PKR Kinase Activity in Mammalian Cells, Microbiol. Immunol., 45-840. doi: 10.1111/j.1348-0421.2001.tbo1322.x.).

[0034] One embodiment of the HPV16 E6 polypeptide sequence is represented herein as SEQ ID No: 1, as follows:

[SEQ ID No: 1]
MHQKRTAMFQDPQERPRKLPQLCTELQTTIHDIILECVYCKQQLLRR
EVYDFAFRDLCIVYRDGNPYAVCDKCLKFYSKISEYRHYCYSLYGTT
LEQQYNKPLCDLLIRCINCQKPLCPEEKQRHLDKKQRFHNIRGRWTG
RCMSCCRSSRTRRETQL

[0035] Therefore, preferably the RNA construct of the first aspect comprises a nucleotide sequence which encodes an amino acid sequence substantially as set out in SEQ ID No: 1, or a variant or fragment thereof.

[0036] In one embodiment, the HPV16 E6 polypeptide is encoded by the DNA nucleotide sequence of SEQ ID No: 2, as follows:

[SEQ ID No: 2]
ATGCACCAAAAGAGAACTGCAATGTTTCAGGACCCACAGGAGCGACC
CAGAAAGTTACCACAGTTATGCACAGAGCTGCAAACAACTATACATG
ATATAATATTAGAATGTGTGTACTGCAAGCAACAGTTACTGCGACGT
GAGGTATATGACTTTGCTTTTCGGGATTTATGCATAGTATATAGAGA
TGGGAATCCATATGCTGTATGTGATAAATGTTTAAAGTTTTATTCTA
AAATTAGTGAGTATAGACATTATTGTTATAGTTTGTATGGAACAACA
TTAGAACAGCAATACAACAAACCGTTGTGTGATTTGTTAATTAGGTG
TATTAACTGTCAAAAGCCACTGTGTCCTGAAGAAAAGCAAAGACATC
TGGACAAAAAGCAAAGATTCCATAATATAAGGGGTCGGTGGACCGGT
CGATGTATGTCTTGTTGCAGATCATCAAGAACACGTAGAGAAACCCA
GCTG

[0037] Accordingly, preferably the HPV16 E6 polypeptide is encoded by the DNA nucleotide sequence substantially as set out in SEQ ID NO: 2, or a variant or fragment thereof.

[0038] Thus, the RNA construct may comprise an RNA nucleotide sequence of SEQ ID No: 3, as follows:

[SEQ ID No: 3]
AUGCACCAAAAGAGAACUGCAAUGUUUCAGGACCC
ACAGGAGCGACCCAGAAAGUUACCACAGUUAUGCA
CAGAGCUGCAAACAACUAUACAUGAUAUAAUAUUA
GAAUGUGUGUACUGCAAGCAACAGUUACUGCGACG
UGAGGUAUAUGACUUUGCUUUUCGGGAUUUAUGCA
UAGUAUAUAGAGAUGGGAAUCCAUAUGCUGUAUGU
GAUAAAUGUUUAAAGUUUUAUUCUAAAAUUAGUGA
GUAUAGACAUUAUUGUUAUAGUUUGUAUGGAACAA
CAUUAGAACAGCAAUACAACAAACCGUUGUGUGAU
UUGUUAAUUAGGUGUAUUAACUGUCAAAAGCCACU
GUGUCCUGAAGAAAAGCAAAGACAUCUGGACAAAA
AGCAAAGAUUCCAUAAUAUAAGGGGUCGGUGGACC
GGUCGAUGUAUGUCUUGUUGCAGAUCAUCAAGAAC
ACGUAGAGAAACCCAGCUG

[0039] Furthermore, preferably the RNA construct comprises an RNA nucleotide sequence substantially as set out in SEQ ID No: 3, or a variant or fragment thereof.

[0040] The inventors then subjected the protein sequence of SEQ ID No: 1 to codon optimisation for human expression, and one embodiment of the codon optimised nucleic acid (DNA) sequence that includes a start (ATG) and a stop (TGA) codon is provided herein as SEQ ID No: 4, as follows:

[SEQ ID No: 4]
ATGCACCAGAAACGGACCGCCATGTTCCAGGATCC
TCAAGAGAGGCCCAGAAAGCTGCCTCAGCTGTGTA
CCGAGCTGCAGACCACCATCCACGACATCATCCTG
GAATGCGTGTACTGCAAGCAGCAGCTCCTGCGGAG
AGAGGTGTACGATTTCGCCTTCCGGGACCTGTGCA
TCGTGTACAGAGATGGCAACCCCTACGCCGTGTGC
GACAAGTGCCTGAAGTTCTACAGCAAGATCAGCGA
GTACCGGCACTACTGCTACAGCCTGTACGGCACCA
CACTGGAACAGCAGTACAACAAGCCCCTGTGCGAC
CTGCTGATCCGGTGCATCAACTGCCAGAAACCTCT
GTGCCCCGAGGAAAAGCAGCGGCACCTGGACAAGA
AGCAGCGGTTCCACAACATCAGAGGCCGGTGGACC
GGCAGATGCATGAGCTGTTGTCGGAGCAGCAGAAC
CAGACGGGAAACCCAGCTGTGA

[0041] Hence, preferably the RNA construct is encoded by a DNA sequence substantially as set out in SEQ ID No: 4, or a fragment or variant thereof.

[0042] In an embodiment, the RNA sequence corresponding to the codon optimised DNA sequence of SEQ ID No: 4 that includes a start (AUG) and a stop (UGA) codon is provided herein as SEQ ID No: 5, as follows:

[SEQ ID No: 5]
AUGCACCAGAAACGGACCGCCAUGUUCCAGGAUCC
UCAAGAGAGGCCCAGAAAGCUGCCUCAGCUGUGUA
CCGAGCUGCAGACCACCAUCCACGACAUCAUCCUG
GAAUGCGUGUACUGCAAGCAGCAGCUCCUGCGGAG
AGAGGUGUACGAUUUCGCCUUCCGGGACCUGUGCA
UCGUGUACAGAGAUGGCAACCCCUACGCCGUGUGC
GACAAGUGCCUGAAGUUCUACAGCAAGAUCAGCGA
GUACCGGCACUACUGCUACAGCCUGUACGGCACCA
CACUGGAACAGCAGUACAACAAGCCCCUGUGCGAC
CUGCUGAUCCGGUGCAUCAACUGCCAGAAACCUCU
GUGCCCCGAGGAAAAGCAGCGGCACCUGGACAAGA
AGCAGCGGUUCCACAACAUCAGAGGCCGGUGGACC
GGCAGAUGCAUGAGCUGUUGUCGGAGCAGCAGAAC
CAGACGGGAAACCCAGCUGUGA

[0043] Hence, preferably the RNA construct comprises a sequence substantially as set out in SEQ ID No: 5, or a fragment or variant thereof.

[0044] In one embodiment, the at least one IIP may be HSV ICP34.5 (Herpes simplex virus ICP34.5; YP_009137073.1; Accession Number—NCBI Reference Sequence: NC_001806.2; UniProtKB—P36313 (ICP34_HHV11)), or an orthologue thereof. HSV ICP34.5 has been shown to sequester TBK1 and interfere with the interaction between TBK1 and IRF3, ultimately leading to the inactivation of IRF3. Zhu H, Zheng C (2020).

[0045] The race between host antiviral innate immunity and the immune evasion strategies of Herpes simplex virus 1. Microbiol Mol Biol Rev., 84(4): e00099-20. One embodiment of the HSV ICP34.5 polypeptide sequence is represented herein as SEQ ID No:6, as follows:

[SEQ ID No: 6]
MARRRRHRGPRRPRPPGPTGAVPTAQSQVTSTPNS
EPAVRSAPAAAPPPPPAGGPPPSCSLLLRQWLHVP
ESASDDDDDDDWPDSPPPEPAPEARPTAAAPRPRP
PPPGVGPGGGADPSHPPSRPFRLPPRLALRLRVTA
EHLARLRLRRAGGEGAPEPPATPATPATPATPATP
ARVRFSPHVRVRHLVVWASAARLARRGSWARERAD
RARFRRRVAEAEAVIGPCLGPEARARALARGAGPA
NSV

[0046] Therefore, preferably the RNA construct of the first aspect comprises a nucleotide sequence which encodes an amino acid sequence substantially as set out in SEQ ID No: 6, or a variant or fragment thereof.

[0047] In one embodiment, the HSV ICP34.5 polypeptide is encoded by the DNA nucleotide sequence of SEQ ID No: 7, as follows:

[SEQ ID No: 7]
ATGGCCCGCCGCCGCCGCCATCGCGGCCCCCGCCG
CCCCCGGCCGCCCGGGCCCACGGGCGCCGTCCCAA
CCGCACAGTCCCAGGTAACCTCCACGCCCAACTCG
GAACCCGCGGTCAGGAGCGCGCCCGCGGCCGCCCC
GCCGCCGCCCCCCGCCGGTGGGCCCCCGCCTTCTT
GTTCGCTGCTGCTGCGCCAGTGGCTCCACGTTCCC
GAGTCCGCGTCCGACGACGACGATGACGACGACTG
GCCGGACAGCCCCCCGCCCGAGCCGGCGCCAGAGG
CCCGGCCCACCGCCGCCGCCCCCCGGCCCCGGCCC
CCACCGCCCGGCGTGGGCCCGGGGGGCGGGGCTGA
CCCCTCCCACCCCCCCTCGCGCCCCTTCCGCCTTC
CGCCGCGCCTCGCCCTCCGCCTGCGCGTCACCGCG
GAGCACCTGGCGCGCCTGCGCCTGCGACGCGCGGG
CGGGGAGGGGGCGCCGGAGCCCCCCGCGACCCCCG
CGACCCCCGCGACCCCCGCGACCCCCGCGACCCCC
GCGCGGGTGCGCTTCTCGCCCCACGTCCGGGTGCG
CCACCTGGTGGTCTGGGCCTCGGCCGCCCGCCTGG
CGCGCCGCGGCTCGTGGGCCCGCGAGCGGGCCGAC
CGGGCTCGGTTCCGGCGCCGGGTGGCGGAGGCCGA
GGCGGTCATCGGGCCGTGCCTGGGGCCCGAGGCCC
GTGCCCGGGCCCTGGCCCGCGGAGCCGGCCCGGCG
AACTCGGTC

[0048] Accordingly, preferably the HSV ICP34.5 polypeptide is encoded by the DNA nucleotide sequence substantially as set out in SEQ ID NO: 7, or a variant or fragment thereof.

[0049] Thus, the RNA construct may comprise an RNA nucleotide sequence of SEQ ID No: 8, as follows:

[SEQ ID No: 8]
AUGGCCCGCCGCCGCCGCCAUCGCGGCCCCCGCCG
CCCCCGGCCGCCCGGGCCCACGGGCGCCGUCCCAA
CCGCACAGUCCCAGGUAACCUCCACGCCCAACUCG
GAACCCGCGGUCAGGAGCGCGCCCGCGGCCGCCCC
GCCGCCGCCCCCCGCCGGUGGGCCCCCGCCUUCUU
GUUCGCUGCUGCUGCGCCAGUGGCUCCACGUUCCC
GAGUCCGCGUCCGACGACGACGAUGACGACGACUG
GCCGGACAGCCCCCCGCCCGAGCCGGCGCCAGAGG
CCCGGCCCACCGCCGCCGCCCCCCGGCCCCGGCCC
CCACCGCCCGGCGUGGGCCCGGGGGGCGGGGCUGA
CCCCUCCCACCCCCCCUCGCGCCCCUUCCGCCUUC
CGCCGCGCCUCGCCCUCCGCCUGCGCGUCACCGCG
GAGCACCUGGCGCGCCUGCGCCUGCGACGCGCGGG
CGGGGAGGGGGCGCCGGAGCCCCCCGCGACCCCCG
CGACCCCCGCGACCCCCGCGACCCCCGCGACCCCC
GCGCGGGUGCGCUUCUCGCCCCACGUCCGGGUGCG
CCACCUGGUGGUCUGGGCCUCGGCCGCCCGCCUGG
CGCGCCGCGGCUCGUGGGCCCGCGAGCGGGCCGAC
CGGGCUCGGUUCCGGCGCCGGGUGGCGGAGGCCGA
GGCGGUCAUCGGGCCGUGCCUGGGGCCCGAGGCCC
GUGCCCGGGCCCUGGCCCGCGGAGCCGGCCCGGCG
AACUCGGUC

[0050] Furthermore, preferably the RNA construct comprises an RNA nucleotide sequence substantially as set out in SEQ ID No: 8, or a variant or fragment thereof.

[0051] The inventors then subjected the protein sequence of SEQ ID No: 6 to codon optimisation for human expression, and one embodiment of the codon optimised nucleic acid (DNA) sequence that includes a start (ATG) and a stop (TGA) codon is provided herein as SEQ ID No: 9, as follows:

[SEQ ID No: 9]
ATGGCCAGAAGAAGGCGGCACAGAGGACCCAGAAG
GCCTAGACCTCCTGGACCAACAGGTGCCGTTCCTA
CCGCTCAGAGCCAAGTGACCAGCACACCCAATTCT
GAACCTGCCGICAGAAGCGCCCCTGCTGCTGCTCC
TCCACCTCCACCAGCTGGCGGACCTCCACCTTCTT
GTTCTCTGCTGCTGAGACAGIGGCTGCACGTGCCA
GAGTCCGCCTCCGACGATGATGACGATGACGACTG
GCCTGACAGCCCTCCTCCAGAACCTGCTCCTGAAG
CCAGACCTACAGCCGCTGCTCCTAGACCTAGACCA
CCACCTCCAGGTGTTGGACCTGGTGGCGGAGCTGA
TCCTTCTCACCCTCCTAGCAGACCCTTCCGGCTTC
CTCCTAGACTGGCCCTGAGACTGAGAGTGACAGCC
GAACACCTGGCCAGACTGAGACTTCGTAGAGCAGG
CGGAGAAGGCGCTCCTGAACCTCCTGCTACACCAG
CCACACCAGCTACTCCCGCAACTCCTGCCACTCCT
GCTAGAGTGCGGTTTAGCCCTCACGTCCGCGTCAG
ACATCIGGTCGTTTGGGCCTCTGCTGCCCGGCTTG
CTAGAAGAGGATCTTGGGCCAGAGAGAGAGCCGAC
GGGCTAGAGCACTTGCTAGAGGIGCCGGACCTGCC
AACAGCGTGTGA

[0052] Hence, preferably the RNA construct comprises a sequence substantially as set out in SEQ ID No: 9, or a fragment or variant thereof.

[0053] In an embodiment, the RNA sequence corresponding to the codon optimised DNA sequence of SEQ ID No: 9 that includes a start (AUG) and a stop (UGA) codon is provided herein as SEQ ID No: 10, as follows:

[SEQ ID No: 10]
AUGGCCAGAAGAAGGCGGCACAGAGGACCCAGAAG
GCCUAGACCUCCUGGACCAACAGGUGCCGUUCCUA
CCGCUCAGAGCCAAGUGACCAGCACACCCAAUUCU
GAACCUGCCGUCAGAAGCGCCCCUGCUGCUGCUCC
UCCACCUCCACCAGCUGGCGGACCUCCACCUUCUU
GUUCUCUGCUGCUGAGACAGUGGCUGCACGUGCCA
GAGUCCGCCUCCGACGAUGAUGACGAUGACGACUG
GCCUGACAGCCCUCCUCCAGAACCUGCUCCUGAAG
CCAGACCUACAGCCGCUGCUCCUAGACCUAGACCA
CCACCUCCAGGUGUUGGACCUGGUGGCGGAGCUGA
UCCUUCUCACCCUCCUAGCAGACCCUUCCGGCUUC
CUCCUAGACUGGCCCUGAGACUGAGAGUGACAGCC
GAACACCUGGCCAGACUGAGACUUCGUAGAGCAGG
CGGAGAAGGCGCUCCUGAACCUCCUGCUACACCAG
CCACACCAGCUACUCCCGCAACUCCUGCCACUCCU
GCUAGAGUGCGGUUUAGCCCUCACGUCCGCGUCAG
ACAUCUGGUCGUUUGGGCCUCUGCUGCCCGGCUUG
CUAGAAGAGGAUCUUGGGCCAGAGAGAGAGCCGAC
CGGGCUAGAUUUCGGAGAAGAGUGGCCGAAGCCGA
GGCCGUGAUUGGACCUUGUCUUGGCCCUGAAGCUC
GGGCUAGAGCACUUGCUAGAGGUGCCGGACCUGCC
AACAGCGUGUGA

[0054] Hence, preferably the RNA construct comprises a sequence substantially as set out in SEQ ID No: 10, or a fragment or variant thereof.

[0055] In one embodiment, the at least one IIP may be HCV E2 (hepatitis C virus E2; NS1 Protein from polyprotein ADC54662.1; Accession Number—Genomic RNA Translation ADC54662.1; UniProtKB—D3W8R2 (D3W8R2_9HEPC)), or an orthologue thereof. One action of HCV E2 is to inhibit PKR. Taylor D R, Shi S T, Romano P R, Barber G N, Lai M M C (1999). Inhibition of the interferon-inducible protein kinase PKR by HCV E2 protein. Science, 285, 107-110. doi: 10.1126/science.285.5424.107 One embodiment of the HCV E2 polypeptide sequence is represented herein as SEQ ID No:11, as follows:

[SEQ ID No: 11]
METHVTGGSAGHTVSGFVSLLAPGAKONVQLINTN
GSWHLNSTALNCNDSLNTGWLAGLFYHHKFNSSGC
PERLASCRPLTDFDQGWGPISYANGSGPDQRPYCW
HYPPKPCGIVPAKSVCGPVYCFTPSPVVVGTTDRS
GAPTYSWGENDTDVFVLNNTRPPLGNWFGCTWMNS
TGFTKVCGAPPCVIGGAGNNTLHCPTDCFRKHPDA
TYSRCGSGPWITPRCLVDYPYRLWHYPCTINYTIF
KIRMYVGGVEHRLEAACNWTRGERCDLEDRDRSEL
SPLLLTTTQWQVLPCSFTTLPALSTGLIHLHQNIV
DVQYLYGVGSSIASWAIKWEYVVLLFLLLADARVC
SCLWMMLLISQAEA

[0056] Therefore, preferably the RNA construct of the first aspect comprises a nucleotide sequence which encodes an amino acid sequence substantially as set out in SEQ ID No: 11, or a variant or fragment thereof.

[0057] In one embodiment, the HCV E2 polypeptide is encoded by the DNA nucleotide sequence of SEQ ID No: 12, as follows:

[SEQ ID No: 12]
ATGGAAACCCACGTCACCGGGGGAAGTGCCGGCCA
CACTGIGTCTGGATTTGTTAGCCTCCTCGCACCAG
GCGCCAAGCAGAACGTCCAGCTGATCAACACCAAC
GGCAGTTGGCACCTCAATAGCACGGCCCTGAACTG
CAATGATAGCCTTAACACCGGCTGGTTAGCAGGGC
TTTTCTATCACCACAAGTTCAACTCTTCAGGCTGT
ACGGAAGCGGCCCCGACCAGCGCCCCTACTGCTGG
CACTACCCCCCTAAACCTTGCGGTGTTGTGCCCGC
GAAGAGTGTGIGTGGTCCGGTATATTGCTTCACTC
CCAGCCCCGTGGTGGTGGGAACGACCGACAGGTCG
GGCGCGCCTACCIACAGCIGGGGTGAAAATGATAC
GGACGTCTTCGTCCTTAACAATACCAGGCCACCGC
TGGGCAATTGGTTCGGTTGTACCTGGATGAACTCA
ACTGGATTCACCAAAGTGTGCGGAGCGCCTCCCTG
TGTCATCGGAGGGGCGGGCAACAACACCCTGCACT
GCCCCACTGATTGCTTCCGCAAGCATCCGGACGCC
ACATACTCTCGGTGCGGCTCCGGTCCCTGGATCAC
ACCCAGGTGCCTGGTCGACTACCCGTATAGGCTTT
GGCATTATCCTTGTACCATCAACTACACCATATTT
AAAATCAGGATGTACGTGGGAGGGGTCGAGCACAG
GCTGGAAGCTGCTTGCAACTGGACGCGGGGCGAAC
GTTGCGATCTGGAAGACAGGGACAGGTCCGAGCTC
AGCCCGTTACTGCTGACCACTACACAGTGGCAGGT
CCTCCCGTGTTCCTTCACAACCCTGCCAGCCTTGT
CCACCGGCCTCATCCACCTCCACCAGAACATTGTG
GACGTGCAGTACTTGTACGGGGTGGGGTCAAGCAT
CGCGTCCTGGGCCATTAAGTGGGAGTACGTCGTTC
TCCTGTTCCTTCTGCTTGCAGACGCGCGCGTCTGC
TCCTGCTTGTGGATGATGCTACTCATATCCCAAGC
GGAGGCG

[0058] Accordingly, preferably the HCV E2 polypeptide is encoded by the DNA nucleotide sequence substantially as set out in SEQ ID NO: 12, or a variant or fragment thereof.

[0059] Thus, the RNA construct may comprise an RNA nucleotide sequence of SEQ ID No: 13, as follows:

[SEQ ID No: 13]
AUGGAAACCCACGUCACCGGGGGAAGUGCCGGCCA
CACUGUGUCUGGAUUUGUUAGCCUCCUCGCACCAG
GCGCCAAGCAGAACGUCCAGCUGAUCAACACCAAC
GGCAGUUGGCACCUCAAUAGCACGGCCCUGAACUG
CAAUGAUAGCCUUAACACCGGCUGGUUAGCAGGGC
UUUUCUAUCACCACAAGUUCAACUCUUCAGGCUGU
CCUGAGAGGCUAGCCAGCUGCCGACCCCUUACCGA
UUUUGACCAGGGCUGGGGCCCUAUCAGUUAUGCCA
ACGGAAGCGGCCCCGACCAGCGCCCCUACUGCUGG
CACUACCCCCCUAAACCUUGCGGUGUUGUGCCCGC
GAAGAGUGUGUGUGGUCCGGUAUAUUGCUUCACUC
CCAGCCCCGUGGUGGUGGGAACGACCGACAGGUCG
GGCGCGCCUACCUACAGCUGGGGUGAAAAUGAUAC
GGACGUCUUCGUCCUUAACAAUACCAGGCCACCGC
UGGGCAAUUGGUUCGGUUGUACCUGGAUGAACUCA
ACUGGAUUCACCAAAGUGUGCGGAGCGCCUCCCUG
UGUCAUCGGAGGGGCGGGCAACAACACCCUGCACU
GCCCCACUGAUUGCUUCCGCAAGCAUCCGGACGCC
ACAUACUCUCGGUGCGGCUCCGGUCCCUGGAUCAC
ACCCAGGUGCCUGGUCGACUACCCGUAUAGGCUUU
GGCAUUAUCCUUGUACCAUCAACUACACCAUAUUU
AAAAUCAGGAUGUACGUGGGAGGGGUCGAGCACAG
GCUGGAAGCUGCUUGCAACUGGACGCGGGGCGAAC
GUUGCGAUCUGGAAGACAGGGACAGGUCCGAGCUC
AGCCCGUUACUGCUGACCACUACACAGUGGCAGGU
CCUCCCGUGUUCCUUCACAACCCUGCCAGCCUUGU
CCACCGGCCUCAUCCACCUCCACCAGAACAUUGUG
GACGUGCAGUACUUGUACGGGGUGGGGUCAAGCAU
CGCGUCCUGGGCCAUUAAGUGGGAGUACGUCGUUC
UCCUGUUCCUUCUGCUUGCAGACGCGCGCGUCUGC
UCCUGCUUGUGGAUGAUGCUACUCAUAUCCCAAGC
GGAGGCG

[0060] Furthermore, preferably the RNA construct comprises an RNA nucleotide sequence substantially as set out in SEQ ID No: 13, or a variant or fragment thereof.

[0061] The inventors then subjected the protein sequence of SEQ ID No: 11 to codon optimisation for human expression, and one embodiment of the codon optimised nucleic acid (DNA) sequence that includes a start (ATG) and a stop (TGA) codon is provided herein as SEQ ID No: 14, as follows:

[SEQ ID No: 14]
ATGGAAACCCACGTGACAGGCGGATCTGCCGGCCA
TACAGTGTCCGGCTTTGTGTCTCTTCIGGCCCCTG
GCGCCAAGCAGAATGTGCAGCTGATCAACACCAAC
GGCAGCTGGCACCTGAACAGCACAGCCCTGAACTG
CAACGACAGCCTGAATACCGGATGGCTGGCCGGCC
TGTTCTACCACCACAAGTTCAATAGCAGCGGCTGC
CCCGAGAGACIGGCCTCTTGTAGACCTCTGACCGA
CTTCGATCAAGGCTGGGGCCCTATCAGCTACGCCA
ATGGCTCTGGACCTGACCAGAGGCCTTACTGCTGG
CACTACCCTCCAAAGCCTTGCGGAATCGTGCCTGC
CAAGTCTGTGTGTGGCCCCGTGTACTGCTTCACCC
CATCTCCAGTGGTCGTGGGCACCACCGATAGATCT
GGCGCCCCAACATATAGCIGGGGCGAGAACGACAC
CGACGTGTTCGTGCTGAACAACACCCGGCCTCCAC
TCGGAAATTGGTTCGGCTGCACCTGGATGAACTCC
ACCGGCTTCACAAAAGTGIGCGGAGCCCCTCCTTG
TGTGATTGGCGGAGCCGGAAACAATACCCTGCACT
GCCCTACCGACTGCTTCAGAAAGCACCCCGACGCC
ACCTACAGCAGATGTGGATCTGGCCCTTGGATCAC
CCCTAGATGCCTGGTGGACTACCCCTACCGGCTGT
GGCACTATCCCTGCACCATCAACTACACCATCTTC
AAGATCCGTATGTACGTCGGCGGCGTGGAACACAG
ACTGGAAGCCGCCTGTAACTGGACCAGGGGCGAGA
GATGCGACCTGGAAGATAGAGACAGAAGCGAGCTG
AGCCCTCTGCTGCTGACCACCACACAGTGGCAGGT
CCTGCCTTGCAGCTTCACCACACTGCCTGCTCTGA
GCACCGGCCTGATTCATCTGCACCAGAACATCGTG
GACGTGCAGTACCTGTACGGCGTGGGAAGCTCTAT
TGCCAGCTGGGCCATCAAGTGGGAGTACGTGGIGC
TGCTGTTCCTGCTGCIGGCCGATGCCAGAGIGTGT
AGCTGCCTGTGGATGATGCTGCTGATCTCTCAGGC
CGAGGCCTGA

[0062] Hence, preferably the RNA construct is encoded by a DNA sequence substantially as set out in SEQ ID No: 14, or a fragment or variant thereof.

[0063] In an embodiment, the RNA sequence corresponding to the codon optimised DNA sequence of SEQ ID No: 14 that includes a start (AUG) and a stop (UGA) codon is provided herein as SEQ ID No: 15, as follows:

[SEQ ID No: 15]
AUGGAAACCCACGUGACAGGCGGAUCUGCCGGCCA
UACAGUGUCCGGCUUUGUGUCUCUUCUGGCCCCUG
GCGCCAAGCAGAAUGUGCAGCUGAUCAACACCAAC
GGCAGCUGGCACCUGAACAGCACAGCCCUGAACUG
CAACGACAGCCUGAAUACCGGAUGGCUGGCCGGCC
UGUUCUACCACCACAAGUUCAAUAGCAGCGGCUGC
CCCGAGAGACUGGCCUCUUGUAGACCUCUGACCGA
CUUCGAUCAAGGCUGGGGCCCUAUCAGCUACGCCA
AUGGCUCUGGACCUGACCAGAGGCCUUACUGCUGG
CACUACCCUCCAAAGCCUUGCGGAAUCGUGCCUGC
CAAGUCUGUGUGUGGCCCCGUGUACUGCUUCACCC
CAUCUCCAGUGGUCGUGGGCACCACCGAUAGAUCU
GGCGCCCCAACAUAUAGCUGGGGCGAGAACGACAC
CGACGUGUUCGUGCUGAACAACACCCGGCCUCCAC
UCGGAAAUUGGUUCGGCUGCACCUGGAUGAACUCC
ACCGGCUUCACAAAAGUGUGCGGAGCCCCUCCUUG
UGUGAUUGGCGGAGCCGGAAACAAUACCCUGCACU
GCCCUACCGACUGCUUCAGAAAGCACCCCGACGCC
ACCUACAGCAGAUGUGGAUCUGGCCCUUGGAUCAC
CCCUAGAUGCCUGGUGGACUACCCCUACCGGCUGU
GGCACUAUCCCUGCACCAUCAACUACACCAUCUUC
AAGAUCCGUAUGUACGUCGGCGGCGUGGAACACAG
ACUGGAAGCCGCCUGUAACUGGACCAGGGGCGAGA
GAUGCGACCUGGAAGAUAGAGACAGAAGCGAGCUG
AGCCCUCUGCUGCUGACCACCACACAGUGGCAGGU
CCUGCCUUGCAGCUUCACCACACUGCCUGCUCUGA
GCACCGGCCUGAUUCAUCUGCACCAGAACAUCGUG
GACGUGCAGUACCUGUACGGCGUGGGAAGCUCUAU
UGCCAGCUGGGCCAUCAAGUGGGAGUACGUGGUGC
UGCUGUUCCUGCUGCUGGCCGAUGCCAGAGUGUGU
AGCUGCCUGUGGAUGAUGCUGCUGAUCUCUCAGGC
CGAGGCCUGA

[0064] Hence, preferably the RNA construct comprises a sequence substantially as set out in SEQ ID No: 15, or a fragment or variant thereof.

[0065] In one embodiment, the at least one IIP may be HCV NS5a (hepatitis C virus NS5a; isolate H—Genomic RNA translation: AAA45534.1; UniProtKB—P27958 (POLG_HCV77)), or an orthologue thereof. One embodiment of the HCV NS5a polypeptide sequence is represented herein as SEQ ID No:16, as follows:

[SEQ ID No: 16]
MSGSWLRDIWDWICEVLSDFKTWLKAKLMPQLPGI
PFVSCQRGYRGVWRGDGIMHTRCHCGAEITGHVKN
GTMRIVGPRTCKNMWSGTFFINAYTTGPCTPLPAP
NYKFALWRVSAEEYVEIRRVGDFHYVSGMTTDNLK
CPCQIPSPEFFTELDGVRLHRFAPPCKPLLREEVS
FRVGLHEYPVGSQLPCEPEPDVAVLTSMLTDPSHI
TAEAAGRRLARGSPPSMASSSASQLSAPSLKATCT
ANHDSPDAELIEANLLWRQEMGGNITRVESENKVV
ILDSFDPLVAEEDEREVSVPAEILRKSRRFAPALP
VWARPDYNPLLVETWKKPDYEPPVVHGCPLPPPRS
PPVPPPRKKRTVVLTESTLPTALAELATKSFGSSS
TSGITGDNTTTSSEPAPSGCPPDSDVESYSSMPPL
EGEPGDPDLSDGSWSTVSSGADTEDVVCC

[0066] Therefore, preferably the RNA construct of the first aspect comprises a nucleotide sequence which encodes an amino acid sequence substantially as set out in SEQ ID No: 16, or a variant or fragment thereof.

[0067] In one embodiment, the HCV NS5a polypeptide is encoded by the DNA nucleotide sequence of SEQ ID No: 17, as follows:

[SEQ ID No: 17]
ATGTCCGGTTCCTGGCTAAGGGACATCTGGGACTG
GATATGCGAGGTGCTGAGCGACTTTAAGACCTGGC
TGAAAGCCAAGCTCATGCCACAACTGCCTGGGATT
CCCTTTGTGTCCTGCCAGCGCGGGTATAGGGGGGT
CTGGCGAGGAGACGGCATTATGCACACTCGCTGCC
ACTGTGGAGCTGAGATCACTGGACATGTCAAAAAC
GGGACGATGAGGATCGTCGGTCCTAGGACCTGCAA
GAACATGTGGAGTGGGACGTTCTTCATTAATGCCT
ACACCACGGGCCCCTGTACTCCCCTTCCTGCGCCG
AACTATAAGTTCGCGCTGTGGAGGGIGTCTGCAGA
GGAATACGTGGAGATAAGGCGGGTGGGGGACTTCC
ACTACGTATCGGGCATGACTACTGACAATCTCAAA
TGCCCGTGCCAGATCCCATCGCCCGAATTTTTCAC
AGAATTGGACGGGGTGCGCCTACATAGGTTTGCGC
CCCCTTGCAAGCCCTTGCTGCGGGAGGAGGTATCA
TTCAGAGTAGGACTCCACGAGTACCCGGTGGGGTC
GCAATTACCTTGCGAGCCCGAACCGGACGTAGCCG
TGTTGACGTCCATGCTCACTGATCCCTCCCATATA
ACAGCAGAGGCGGCCGGGAGAAGGTTGGCGAGAGG
GTCACCCCCTTCTATGGCCAGCTCCTCGGCTAGCC
AGCTGTCCGCTCCATCTCTCAAGGCAACTTGCACC
GCCAACCATGACTCCCCTGACGCCGAGCTCATAGA
GGCTAACCTCCTGTGGAGGCAGGAGATGGGCGGCA
ACATCACCAGGGTTGAGTCAGAGAACAAAGTGGTG
ATTCTGGACTCCTTCGATCCGCTTGTGGCAGAGGA
GGATGAGCGGGAGGTCTCCGTACCCGCAGAAATTC
TGCGGAAGTCTCGGAGATTCGCCCCAGCCCTGCCC
GTCTGGGCGCGGCCGGACTACAACCCCCTGCTAGT
AGAGACGTGGAAAAAGCCTGACTACGAACCACCTG
IGGTCCATGGCTGCCCGCTACCACCTCCACGGTCC
CCTCCTGTGCCTCCGCCTCGGAAAAAGCGTACGGT
GGTCCTCACCGAATCAACCCTACCTACTGCCTTGG
CCGAGCTTGCCACCAAAAGTTTTGGCAGCTCCTCA
ACTTCCGGCATTACGGGCGACAATACGACAACATC
CTCTGAGCCCGCCCCTTCIGGCTGCCCCCCCGACT
CCGACGTTGAGTCCTATTCTTCCATGCCCCCCCTG
GAGGGGGAGCCIGGGGATCCGGATCTCAGCGACGG
GTCATGGTCGACGGTCAGTAGTGGGGCCGACACGG
AAGATGTCGTGTGCTGC

[0068] Accordingly, preferably the HCV NS5a polypeptide is encoded by the DNA nucleotide sequence substantially as set out in SEQ ID NO: 17, or a variant or fragment thereof.

[0069] Thus, the RNA construct may comprise an RNA nucleotide sequence of SEQ ID No: 18, as follows:

[SEQ ID No: 18]
AUGUCCGGUUCCUGGCUAAGGGACAUCUGGGACUGGAUAUGCGAGGUGCU
GAGCGACUUUAAGACCUGGCUGAAAGCCAAGCUCAUGCCACAACUGCCUG
GGAUUCCCUUUGUGUCCUGCCAGCGCGGGUAUAGGGGGGUCUGGCGAGGA
GACGGCAUUAUGCACACUCGCUGCCACUGUGGAGCUGAGAUCACUGGACA
UGUCAAAAACGGGACGAUGAGGAUCGUCGGUCCUAGGACCUGCAAGAACA
UGUGGAGUGGGACGUUCUUCAUUAAUGCCUACACCACGGGCCCCUGUACU
CCCCUUCCUGCGCCGAACUAUAAGUUCGCGCUGUGGAGGGUGUCUGCAGA
GGAAUACGUGGAGAUAAGGCGGGUGGGGGACUUCCACUACGUAUCGGGCA
UGACUACUGACAAUCUCAAAUGCCCGUGCCAGAUCCCAUCGCCCGAAUUU
UUCACAGAAUUGGACGGGGUGCGCCUACAUAGGUUUGCGCCCCCUUGCAA
GCCCUUGCUGCGGGAGGAGGUAUCAUUCAGAGUAGGACUCCACGAGUACC
CGGUGGGGUCGCAAUUACCUUGCGAGCCCGAACCGGACGUAGCCGUGUUG
ACGUCCAUGCUCACUGAUCCCUCCCAUAUAACAGCAGAGGCGGCCGGGAG
AAGGUUGGCGAGAGGGUCACCCCCUUCUAUGGCCAGCUCCUCGGCUAGCC
AGCUGUCCGCUCCAUCUCUCAAGGCAACUUGCACCGCCAACCAUGACUCC
CCUGACGCCGAGCUCAUAGAGGCUAACCUCCUGUGGAGGCAGGAGAUGGG
CGGCAACAUCACCAGGGUUGAGUCAGAGAACAAAGUGGUGAUUCUGGACU
CCUUCGAUCCGCUUGUGGCAGAGGAGGAUGAGCGGGAGGUCUCCGUACCC
GCAGAAAUUCUGCGGAAGUCUCGGAGAUUCGCCCCAGCCCUGCCCGUCUG
GGCGCGGCCGGACUACAACCCCCUGCUAGUAGAGACGUGGAAAAAGCCUG
ACUACGAACCACCUGUGGUCCAUGGCUGCCCGCUACCACCUCCACGGUCC
CCUCCUGUGCCUCCGCCUCGGAAAAAGCGUACGGUGGUCCUCACCGAAUC
AACCCUACCUACUGCCUUGGCCGAGCUUGCCACCAAAAGUUUUGGCAGCU
CCUCAACUUCCGGCAUUACGGGCGACAAUACGACAACAUCCUCUGAGCCC
GCCCCUUCUGGCUGCCCCCCCGACUCCGACGUUGAGUCCUAUUCUUCCAU
GCCCCCCCUGGAGGGGGAGCCUGGGGAUCCGGAUCUCAGCGACGGGUCAU
GGUCGACGGUCAGUAGUGGGGCCGACACGGAAGAUGUCGUGUGCUGC

[0070] Furthermore, preferably the RNA construct comprises an RNA nucleotide sequence substantially as set out in SEQ ID No: 18, or a variant or fragment thereof.

[0071] The inventors then subjected the protein sequence of SEQ ID No: 16 to codon optimisation for human expression, and one embodiment of the codon optimised nucleic acid (DNA) sequence that includes a start (ATG) and a stop (TGA) codon is provided herein as SEQ ID No: 19, as follows:

[SEQ ID No: 19]
ATGTCTGGCAGCTGGCTGAGAGACATCTGGGACTGGATTTGCGAGGTGCT
GAGCGACTTCAAGACCTGGCTGAAGGCCAAGCTGATGCCTCAGCTGCCTG
GCATCCCTTTCGTGTCCTGTCAGAGGGGCTATAGAGGCGTTTGGAGAGGC
GACGGCATCATGCACACCAGATGTCACTGTGGCGCCGAGATCACAGGCCA
CGTGAAGAACGGCACCATGAGAATCGTGGGCCCCAGAACCTGCAAGAATA
TGTGGAGCGGCACCTTCTTCATCAACGCCTACACCACCGGACCTTGCACA
CCTCTGCCTGCTCCTAACTACAAGTTCGCCCTGTGGCGGGTGTCCGCCGA
GGAATACGTGGAAATCAGAAGAGTGGGCGACTTCCACTACGTGTCCGGCA
TGACCACCGACAACCTGAAGTGCCCCTGTCAGATCCCATCTCCTGAGTTC
TTCACCGAGCTGGATGGCGTGCGGCTGCACAGATTTGCCCCTCCATGTAA
ACCCCTGCTGAGAGAAGAGGTGTCCTTTAGAGTGGGCCTGCACGAGTACC
CTGTGGGTTCTCAGCTCCCTTGCGAGCCTGAACCTGATGTGGCCGTGCTG
ACCTCCATGCTGACAGACCCTTCTCACATCACAGCCGAGGCCGCTGGAAG
AAGGCTGGCTAGAGGATCTCCTCCTAGCATGGCCTCTAGCAGCGCCTCTC
AACTGTCTGCCCCAAGCCTGAAAGCCACCTGTACCGCCAATCACGACAGC
CCTGATGCCGAGCTGATCGAGGCTAACCTGCTGTGGCGGCAAGAGATGGG
CGGCAACATCACCAGAGTGGAAAGCGAGAACAAGGTGGTCATCCTGGATA
GCTTCGACCCTCTGGTGGCCGAAGAGGACGAGAGGGAAGTGTCTGTGCCT
GCCGAGATCCTGAGAAAGAGCAGAAGATTCGCCCCTGCTCTGCCCGTGTG
GGCCAGACCTGATTACAATCCCCTGCTGGTGGAAACATGGAAGAAGCCCG
ACTACGAGCCTCCTGTGGTGCACGGATGTCCACTGCCTCCACCTAGATCT
CCACCTGTGCCACCTCCACGGAAGAAAAGAACCGTGGTGCTGACCGAGAG
CACCCTGCCTACAGCTCTGGCTGAGCTGGCCACAAAGAGCTTTGGCAGCA
GCAGCACCTCTGGCATCACCGGCGATAATACCACCACCAGCTCTGAGCCT
GCTCCAAGCGGATGTCCTCCTGACTCCGACGTGGAAAGCTACAGCAGCAT
GCCTCCTCTGGAAGGCGAACCCGGCGATCCTGATCTGTCTGATGGCTCTT
GGAGCACCGTGTCCTCTGGCGCCGATACAGAGGATGTCGTGTGCTGCTGA

[0072] Hence, preferably the RNA construct comprises a sequence substantially as set out in SEQ ID No: 19, or a fragment or variant thereof.

[0073] In an embodiment, the RNA sequence corresponding to the codon optimised DNA sequence of SEQ ID No: 19 that includes a start (AUG) and a stop (UGA) codon is provided herein as SEQ ID No: 20, as follows:

[SEQ ID No: 20]
AUGUCUGGCAGCUGGCUGAGAGACAUCUGGGACUGGAUUUGCGAGGUGCU
GAGCGACUUCAAGACCUGGCUGAAGGCCAAGCUGAUGCCUCAGCUGCCUG
GCAUCCCUUUCGUGUCCUGUCAGAGGGGCUAUAGAGGCGUUUGGAGAGGC
GACGGCAUCAUGCACACCAGAUGUCACUGUGGCGCCGAGAUCACAGGCCA
CGUGAAGAACGGCACCAUGAGAAUCGUGGGCCCCAGAACCUGCAAGAAUA
UGUGGAGCGGCACCUUCUUCAUCAACGCCUACACCACCGGACCUUGCACA
CCUCUGCCUGCUCCUAACUACAAGUUCGCCCUGUGGCGGGUGUCCGCCGA
GGAAUACGUGGAAAUCAGAAGAGUGGGCGACUUCCACUACGUGUCCGGCA
UGACCACCGACAACCUGAAGUGCCCCUGUCAGAUCCCAUCUCCUGAGUUC
UUCACCGAGCUGGAUGGCGUGCGGCUGCACAGAUUUGCCCCUCCAUGUAA
ACCCCUGCUGAGAGAAGAGGUGUCCUUUAGAGUGGGCCUGCACGAGUACC
CUGUGGGUUCUCAGCUCCCUUGCGAGCCUGAACCUGAUGUGGCCGUGCUG
ACCUCCAUGCUGACAGACCCUUCUCACAUCACAGCCGAGGCCGCUGGAAG
AAGGCUGGCUAGAGGAUCUCCUCCUAGCAUGGCCUCUAGCAGCGCCUCUC
AACUGUCUGCCCCAAGCCUGAAAGCCACCUGUACCGCCAAUCACGACAGC
CCUGAUGCCGAGCUGAUCGAGGCUAACCUGCUGUGGCGGCAAGAGAUGGG
CGGCAACAUCACCAGAGUGGAAAGCGAGAACAAGGUGGUCAUCCUGGAUA
GCUUCGACCCUCUGGUGGCCGAAGAGGACGAGAGGGAAGUGUCUGUGCCU
GCCGAGAUCCUGAGAAAGAGCAGAAGAUUCGCCCCUGCUCUGCCCGUGUG
GGCCAGACCUGAUUACAAUCCCCUGCUGGUGGAAACAUGGAAGAAGCCCG
ACUACGAGCCUCCUGUGGUGCACGGAUGUCCACUGCCUCCACCUAGAUCU
CCACCUGUGCCACCUCCACGGAAGAAAAGAACCGUGGUGCUGACCGAGAG
CACCCUGCCUACAGCUCUGGCUGAGCUGGCCACAAAGAGCUUUGGCAGCA
GCAGCACCUCUGGCAUCACCGGCGAUAAUACCACCACCAGCUCUGAGCCU
GCUCCAAGCGGAUGUCCUCCUGACUCCGACGUGGAAAGCUACAGCAGCAU
GCCUCCUCUGGAAGGCGAACCCGGCGAUCCUGAUCUGUCUGAUGGCUCUU
GGAGCACCGUGUCCUCUGGCGCCGAUACAGAGGAUGUCGUGUGCUGCUGA

[0074] Hence, preferably the RNA construct comprises a sequence substantially as set out in SEQ ID No: 20, or a fragment or variant thereof.

[0075] In one embodiment, the at least one IIP may be VACV E3L (vaccinia virus E3L; AEY72868.1; Accession Number—Genomic DNA Translation: AEY72868.1; UniProtKB—H2DSW3 (H2DSW3_9POXV)), or an orthologue thereof. VACV E3L would inhibit innate sensing systems through inhibition of PKR and IRF3 and 7 Perdiuero B, Esteban M (2009) The interferon system and vaccinia virus evasion mechanisms. J Interferon Cytokine Res, 29, 9, 581-198.

[0076] One embodiment of the VACV E3L polypeptide sequence is represented herein as SEQ ID No:21, as follows:

[SEQ ID No: 21]
MSKIYIDERSDAEIVCAAIKNIGIEGATAAQLTRQLNMEKREVNKALYDL
QRSAMVYSSDDIPPRWFMTTEADKPDADAMADVIIDDVSREKSMREDHKS
FDDVIPAKKIIDWKDANPVTIINEYCQITKRDWSFRIESVGPSNSPTFYA
CVDIDGRVFDKADGKSKRDAKNNAAKLAVDKLLGYVIIRF

[0077] Therefore, preferably the RNA construct of the first aspect comprises a nucleotide sequence which encodes an amino acid sequence substantially as set out in SEQ ID No: 21, or a variant or fragment thereof.

[0078] In one embodiment, the VACV E3L polypeptide is encoded by the DNA nucleotide sequence of SEQ ID No: 22, as follows:

[SEQ ID No: 22]
ATGTCTAAGATCTATATCGACGAGCGTTCTGACGCAGAGATTGTGTGTGC
GGCTATTAAAAACATTGGAATCGAAGGAGCTACTGCTGCACAACTAACTA
GACAACTTAATATGGAGAAGCGAGAAGTTAATAAAGCTCTGTACGATCTT
CAACGTAGTGCTATGGTGTACAGCTCCGACGATATTCCTCCTCGTTGGTT
TATGACAACGGAGGCGGATAAGCCGGATGCTGATGCTATGGCTGACGTCA
TAATAGATGATGTATCCCGCGAAAAATCAATGAGAGAGGATCATAAGTCT
TTTGATGATGTTATTCCGGCTAAAAAAATTATTGATTGGAAAGATGCTAA
CCCTGTCACCATTATTAATGAGTACTGCCAAATAACTAAGAGAGATTGGT
CTTTTCGTATTGAATCAGTTGGGCCTAGTAACTCTCCTACATTTTATGCC
TGTGTAGATATCGACGGAAGAGTATTCGATAAGGCCGATGGAAAATCTAA
ACGAGATGCTAAAAATAATGCAGCTAAATTGGCTGTAGATAAACTTCTTG
GGTACGTCATCATTAGATTC

[0079] Accordingly, preferably the VACV E3L polypeptide is encoded by the DNA nucleotide sequence substantially as set out in SEQ ID NO: 22, or a variant or fragment thereof.

[0080] Thus, the RNA construct may comprise an RNA nucleotide sequence of SEQ ID No: 23, as follows:

[SEQ ID No: 23]
AUGUCUAAGAUCUAUAUCGACGAGCGUUCUGACGCAGAGAUUGUGUGUGC
GGCUAUUAAAAACAUUGGAAUCGAAGGAGCUACUGCUGCACAACUAACUA
GACAACUUAAUAUGGAGAAGCGAGAAGUUAAUAAAGCUCUGUACGAUCUU
CAACGUAGUGCUAUGGUGUACAGCUCCGACGAUAUUCCUCCUCGUUGGUU
UAUGACAACGGAGGCGGAUAAGCCGGAUGCUGAUGCUAUGGCUGACGUCA
UAAUAGAUGAUGUAUCCCGCGAAAAAUCAAUGAGAGAGGAUCAUAAGUCU
UUUGAUGAUGUUAUUCCGGCUAAAAAAAUUAUUGAUUGGAAAGAUGCUAA
CCCUGUCACCAUUAUUAAUGAGUACUGCCAAAUAACUAAGAGAGAUUGGU
CUUUUCGUAUUGAAUCAGUUGGGCCUAGUAACUCUCCUACAUUUUAUGCC
UGUGUAGAUAUCGACGGAAGAGUAUUCGAUAAGGCCGAUGGAAAAUCUAA
ACGAGAUGCUAAAAAUAAUGCAGCUAAAUUGGCUGUAGAUAAACUUCUUG
GGUACGUCAUCAUUAGAUUC

[0081] Furthermore, preferably the RNA construct comprises an RNA nucleotide sequence substantially as set out in SEQ ID No: 23, or a variant or fragment thereof.

[0082] The inventors then subjected the protein sequence of SEQ ID No: 21 to codon optimisation for human expression, and one embodiment of the codon optimised nucleic acid (DNA) sequence that includes a start (ATG) and a stop (TGA) codon is provided herein as SEQ ID No: 24, as follows:

[SEQ ID No: 24]
ATGAGCAAGATCTACATCGACGAGCGGAGCGACGCCGAGATTGTGTGTGC
CGCCATCAAGAACATCGGCATCGAAGGCGCTACAGCCGCTCAGCTGACCA
GACAGCTGAACATGGAAAAGCGGGAAGTGAACAAGGCCCTGTACGACCTG
CAGAGAAGCGCCATGGTGTACAGCAGCGACGACATCCCTCCTCGGTGGTT
TATGACCACAGAGGCCGACAAGCCCGACGCCGATGCTATGGCCGATGTGA
TCATCGACGACGTGTCCCGCGAGAAGTCCATGAGAGAGGACCACAAGAGC
TTCGATGACGTGATCCCCGCCAAGAAGATCATCGATTGGAAGGACGCCAA
TCCTGTGACCATCATCAACGAGTACTGCCAGATCACCAAGCGCGACTGGT
CCTTCAGAATCGAGAGCGTGGGCCCCAGCAACAGCCCTACCTTTTATGCC
TGCGTGGACATCGACGGCCGGGTGTTCGATAAGGCCGATGGCAAGAGCAA
GCGGGACGCCAAAAACAACGCCGCCAAACTGGCCGTGGATAAGCTGCTGG
GCTACGTGATCATCCGGTTCTGA

[0083] Hence, preferably the RNA construct is encoded by a DNA sequence substantially as set out in SEQ ID No: 24, or a fragment or variant thereof.

[0084] In an embodiment, the RNA sequence corresponding to the codon optimised DNA sequence of SEQ ID No: 24 that includes a start (AUG) and a stop (UGA) codon is provided herein as SEQ ID No: 25, as follows:

[SEQ ID No: 25]
AUGAGCAAGAUCUACAUCGACGAGCGGAGCGACGCCGAGAUUGUGUGUGC
CGCCAUCAAGAACAUCGGCAUCGAAGGCGCUACAGCCGCUCAGCUGACCA
GACAGCUGAACAUGGAAAAGCGGGAAGUGAACAAGGCCCUGUACGACCUG
CAGAGAAGCGCCAUGGUGUACAGCAGCGACGACAUCCCUCCUCGGUGGUU
UAUGACCACAGAGGCCGACAAGCCCGACGCCGAUGCUAUGGCCGAUGUGA
UCAUCGACGACGUGUCCCGCGAGAAGUCCAUGAGAGAGGACCACAAGAGC
UUCGAUGACGUGAUCCCCGCCAAGAAGAUCAUCGAUUGGAAGGACGCCAA
UCCUGUGACCAUCAUCAACGAGUACUGCCAGAUCACCAAGCGCGACUGGU
CCUUCAGAAUCGAGAGCGUGGGCCCCAGCAACAGCCCUACCUUUUAUGCC
UGCGUGGACAUCGACGGCCGGGUGUUCGAUAAGGCCGAUGGCAAGAGCAA
GCGGGACGCCAAAAACAACGCCGCCAAACUGGCCGUGGAUAAGCUGCUGG
GCUACGUGAUCAUCCGGUUCUGA

[0085] Hence, preferably the RNA construct comprises a sequence substantially as set out in SEQ ID No: 25, or a fragment or variant thereof.

[0086] In one embodiment, the at least one IIP may be VACV K3L (vaccinia virus K3L; P20639.1; Accession Number—Genomic DNA Translation: AAA48009.1; UniProtKB—P20639 (K3_VACCC)), or an orthologue thereof. VACV K3L inhibits PKR. Perdiuero B, Esteban M (2009) The interferon system and vaccinia virus evasion mechanisms. J Interferon Cytokine Res, 29, 9, 581-198. One embodiment of the VACV K3L polypeptide sequence is represented herein as SEQ ID No:26, as follows:

[SEQ ID No: 26]
MLAFCYSLPNAGDVIKGRVYEKDYALYIYLFDYPHSEAILAESVKMHMDR
YVEYRDKLVGKTVKVKVIRVDYTKGYIDVNYKRMCRHQ

[0087] Therefore, preferably the RNA construct of the first aspect comprises a nucleotide sequence which encodes an amino acid sequence substantially as set out in SEQ ID No: 26, or a variant or fragment thereof.

[0088] In one embodiment, the VACV K3L polypeptide is encoded by the DNA nucleotide sequence of SEQ ID No: 27, as follows:

[SEQ ID No: 27]
ATGCTTGCATTTTGTTATTCGTTGCCCAATGCGGGCGATGTAATAAAGGG
CAGAGTATACGAGAAGGATTATGCTCTATACATTTATCTTTTTGACTATC
CTCACTCTGAAGCTATCTTGGCAGAGAGTGTTAAGATGCATATGGATAGA
TATGTTGAATATAGGGATAAACTGGTAGGGAAAACTGTAAAAGTTAAAGT
GATTAGAGTTGATTATACAAAAGGATATATAGATGTCAATTACAAAAGGA
TGTGTAGACATCAA

[0089] Accordingly, preferably the VACV K3L polypeptide is encoded by the DNA nucleotide sequence substantially as set out in SEQ ID NO: 27, or a variant or fragment thereof.

[0090] Thus, the RNA construct may comprise an RNA nucleotide sequence of SEQ ID No: 28, as follows:

[SEQ ID No: 28]
AUGCUUGCAUUUUGUUAUUCGUUGCCCAAUGCGGGCGAUGUAAUAAAGGG
CAGAGUAUACGAGAAGGAUUAUGCUCUAUACAUUUAUCUUUUUGACUAUC
CUCACUCUGAAGCUAUCUUGGCAGAGAGUGUUAAGAUGCAUAUGGAUAGA
UAUGUUGAAUAUAGGGAUAAACUGGUAGGGAAAACUGUAAAAGUUAAAGU
GAUUAGAGUUGAUUAUACAAAAGGAUAUAUAGAUGUCAAUUACAAAAGGA
UGUGUAGACAUCAA

[0091] Furthermore, preferably the RNA construct comprises an RNA nucleotide sequence substantially as set out in SEQ ID No: 28, or a variant or fragment thereof.

[0092] The inventors then subjected the protein sequence of SEQ ID No: 26 to codon optimisation for human expression, and one embodiment of the codon optimised nucleic acid (DNA) sequence that includes a start (ATG) and a stop (TGA) codon is provided herein as SEQ ID No: 29, as follows:

[SEQ ID No: 29]
ATGCTGGCCTTCTGCTACAGCCTGCCTAATGCCGGCGACGTGATCAAGGG
CAGAGTGTACGAGAAGGACTACGCCCTGTACATCTACCTGTTCGACTACC
CTCACAGCGAGGCCATCCTGGCCGAGTCTGTGAAGATGCACATGGACAGA
TACGTGGAATACCGGGACAAGCTCGTGGGCAAGACCGTGAAAGTGAAAGT
CATCAGAGTGGACTACACCAAGGGCTACATCGACGTGAACTACAAGCGGA
TGTGCAGGCACCAGTGA

[0093] Hence, preferably the RNA construct is encoded by a DNA sequence substantially as set out in SEQ ID No: 29, or a fragment or variant thereof.

[0094] In an embodiment, the RNA sequence corresponding to the codon optimised DNA sequence of SEQ ID No: 29 that includes a start (AUG) and a stop (UGA) codon is provided herein as SEQ ID No: 30, as follows:

[SEQ ID No: 30]
AUGCUGGCCUUCUGCUACAGCCUGCCUAAUGCCGGCGACGUGAUCAAGGG
CAGAGUGUACGAGAAGGACUACGCCCUGUACAUCUACCUGUUCGACUACC
CUCACAGCGAGGCCAUCCUGGCCGAGUCUGUGAAGAUGCACAUGGACAGA
UACGUGGAAUACCGGGACAAGCUCGUGGGCAAGACCGUGAAAGUGAAAGU
CAUCAGAGUGGACUACACCAAGGGCUACAUCGACGUGAACUACAAGCGGA
UGUGCAGGCACCAGUGA

[0095] Hence, preferably the RNA construct comprises a sequence substantially as set out in SEQ ID No: 30, or a fragment or variant thereof.

[0096] In one embodiment, the at least one IIP may be Vaccinia C6 (VACV C6—vaccinia virus C6; Accession Number—Genomic DNA Translation: AAA69602.1; UniProtKB—P17362 (C6_VACCW)), or an orthologue thereof. This protein is believed to prevent the establishment of a cellular antiviral state by blocking virus-induced phosphorylation and activation of interferon regulatory factors 3/IRF3 and 7/IRF7, transcription factors critical for the induction of interferons alpha and beta. This blockage may be produced through the inhibition of host TBK1, by binding host TBK1 adapter proteins TBKBP1 and AZI2, thereby producing a strong inhibition of the phosphorylation and activation of IRF3 and IRF7. It may also act as an inhibitor of the cellular response to type I IFN by interacting with host STAT2. Mechanistically, it may further exert its inhibitory effect after host ISGF3 complex (composed of STAT1. STAT2 and IRF9) binding to the interferon stimulated response element (Smith G L. Vaccinia Virus Protein C6: A Multifunctional Interferon Antagonist. Adv Exp Med Biol. 2018; 1052:1-7. doi: 10.1007/978-981-10-7572-8_1. PMID: 29785476.). One embodiment of the Vaccinia C6 polypeptide sequence is represented herein as SEQ ID No:31, as follows:

[SEQ ID No: 31]
MNAYNKADSFSLESDSIKDVIHDYICWLSMTDEMRPSIGNVFKAMETFKI
DAVRYYDGNIYELAKDINAMSFDGFIRSLQTIASKKDKLTVYGTMGLLSI
VVDINKGCDISNIKFAAGIIILMEYIFDDTDMSHLKVALYRRIQRRDDVD
R

[0097] Therefore, preferably the RNA construct of the first aspect comprises a nucleotide sequence which encodes an amino acid sequence substantially as set out in SEQ ID No: 31, or a variant or fragment thereof.

[0098] In one embodiment, the Vaccinia C6 polypeptide is encoded by the DNA nucleotide sequence of SEQ ID No: 32, as follows:

[SEQ ID No: 32]
ATGAATGCGTATAATAAAGCCGATTCGTTTTCTTTAGAGTCTGATTCTAT
CAAAGATGTTATACACGATTATATTTGTTGGCTCAGTATGACTGATGAAA
TGAGACCATCTATCGGAAACGTCTTTAAAGCGATGGAAACGTTTAAGATA
GACGCGGTTAGATATTACGATGGTAACATATATGAATTAGCTAAAGATAT
AAATGCGATGTCGTTTGACGGTTTTATAAGATCTCTACAAACTATCGCTT
CAAAGAAAGATAAACTCACTGTTTATGGAACCATGGGACTGCTGTCTATT
GTCGTAGATATTAACAAAGGTTGTGATATATCCAATATCAAGTTCGCTGC
CGGAATAATCATTTTAATGGAGTATATTTTTGATGACACGGATATGTCTC
ATCTTAAAGTAGCACTCTATCGTAGAATACAGAGACGTGATGATGTAGAT
AGA

[0099] Accordingly, preferably the Vaccinia C6 polypeptide is encoded by the DNA nucleotide sequence substantially as set out in SEQ ID NO: 32, or a variant or fragment thereof.

[0100] Thus, the RNA construct may comprise an RNA nucleotide sequence of SEQ ID No: 33, as follows:

[SEQ ID No: 33]
AUGAAUGCGUAUAAUAAAGCCGAUUCGUUUUCUUUAGAGUCUGAUUCUAU
CAAAGAUGUUAUACACGAUUAUAUUUGUUGGCUCAGUAUGACUGAUGAAA
UGAGACCAUCUAUCGGAAACGUCUUUAAAGCGAUGGAAACGUUUAAGAUA
GACGCGGUUAGAUAUUACGAUGGUAACAUAUAUGAAUUAGCUAAAGAUAU
AAAUGCGAUGUCGUUUGACGGUUUUAUAAGAUCUCUACAAACUAUCGCUU
CAAAGAAAGAUAAACUCACUGUUUAUGGAACCAUGGGACUGCUGUCUAUU
GUCGUAGAUAUUAACAAAGGUUGUGAUAUAUCCAAUAUCAAGUUCGCUGC
CGGAAUAAUCAUUUUAAUGGAGUAUAUUUUUGAUGACACGGAUAUGUCUC
AUCUUAAAGUAGCACUCUAUCGUAGAAUACAGAGACGUGAUGAUGUAGAU
AGA

[0101] Furthermore, preferably the RNA construct comprises an RNA nucleotide sequence substantially as set out in SEQ ID No: 33, or a variant or fragment thereof.

[0102] The inventors then subjected the protein sequence of SEQ ID No: 31 to codon optimisation for human expression, and one embodiment of the codon optimised nucleic acid (DNA) sequence that includes a start (ATG) and a stop (TGA) codon is provided herein as SEQ ID No: 34, as follows:

[SEQ ID No: 34]
ATGAACGCCTACAACAAGGCCGACAGCTTCAGCCTGGAAAGCGACAGCAT
CAAGGACGTGATCCACGACTACATCTGCTGGCTGAGCATGACCGACGAGA
TGAGGCCCAGCATCGGCAACGTGTTCAAGGCCATGGAAACCTTCAAGATC
GACGCCGTGCGGTACTACGACGGCAACATCTATGAGCTGGCCAAGGACAT
CAACGCCATGAGCTTCGACGGCTTCATCAGAAGCCTGCAGACAATCGCCA
GCAAGAAAGACAAGCTGACCGTGTACGGCACCATGGGCCTGCTGTCTATC
GTGGTGGATATCAACAAGGGCTGCGACATCAGCAACATCAAGTTCGCCGC
TGGCATCATCATCCTGATGGAGTACATCTTCGACGACACCGACATGAGCC
ACCTGAAGGTGGCCCTGTACAGAAGAATCCAGCGGAGGGACGACGTGGAC
AGATGA

[0103] Hence, preferably the RNA construct is encoded by a DNA sequence substantially as set out in SEQ ID No: 34, or a fragment or variant thereof.

[0104] In an embodiment, the RNA sequence corresponding to the codon optimised DNA sequence of SEQ ID No: 34 that includes a start (AUG) and a stop (UGA) codon is provided herein as SEQ ID No: 35, as follows:

[SEQ ID No: 35]
AUGAACGCCUACAACAAGGCCGACAGCUUCAGCCUGGAAAGCGACAGCAU
CAAGGACGUGAUCCACGACUACAUCUGCUGGCUGAGCAUGACCGACGAGA
UGAGGCCCAGCAUCGGCAACGUGUUCAAGGCCAUGGAAACCUUCAAGAUC
GACGCCGUGCGGUACUACGACGGCAACAUCUAUGAGCUGGCCAAGGACAU
CAACGCCAUGAGCUUCGACGGCUUCAUCAGAAGCCUGCAGACAAUCGCCA
GCAAGAAAGACAAGCUGACCGUGUACGGCACCAUGGGCCUGCUGUCUAUC
GUGGUGGAUAUCAACAAGGGCUGCGACAUCAGCAACAUCAAGUUCGCCGC
UGGCAUCAUCAUCCUGAUGGAGUACAUCUUCGACGACACCGACAUGAGCC
ACCUGAAGGUGGCCCUGUACAGAAGAAUCCAGCGGAGGGACGACGUGGAC
AGAUGA

[0105] Hence, preferably the RNA construct comprises a sequence substantially as set out in SEQ ID No: 35, or a fragment or variant thereof.

[0106] In one embodiment, the at least one IIP may be MERS ORF8b (Middle East Respiratory Syndrome virus ORF8b; Accession Number—GenBank: ANF29170.1; UniProtKB—A0A1W5LGP6 (A0A1W5LGP6_MERS)), or an orthologue thereof. MERS ORF8b is believed to be an antagonist of MDA5-mediated NF-κB activation and IRF3 activation. (Lee J-Y, Bae S, Myoung J (2019) Middle East Respiratory Syndrome Coronavirus-Encoded Accessory Proteins Impair MDA5- and TBK1-Mediated Activation of NF-κB. J Microbiol Biotechnol, 29, 8,1316-1323 doi: 10.4014/jmb.1908.08004. Wong, L-yR, Ye Z W, Lui P-Y, Zheng X, Yuan S, Zhu L, Fung S-Y et al. (2020) Middle East respiratory syndrome coronavirus ORF8b accessory protein suppresses type I IFN expression by impeding HSP70-dependent activation of IRF3 kinase IKK€. J Immunol, 205, 6, 1564-1579).

[0107] One embodiment of the MERS ORF8b polypeptide sequence is represented herein as SEQ ID No:36, as follows:

[SEQ ID No: 36]
MPIPPLRKMLGIGGDRTEKLIPGMELSNWLPGGTSTTLELDPKQHSHSGL
LRMASFGSMKMAPLMLLQLLGRGTLTMIQLLLHNSRPVLSFLKTSTLRGL
EAIVNHLQEPLAQAETLPDLVHKVQDQETLPAALLQVHLESEQ

[0108] Therefore, preferably the RNA construct of the first aspect comprises a nucleotide sequence which encodes an amino acid sequence substantially as set out in SEQ ID No: 36, or a variant or fragment thereof.

[0109] In one embodiment, the MERS ORF8b polypeptide is encoded by the DNA nucleotide sequence of SEQ ID No: 37, as follows:

[SEQ ID No: 37]
ATGCCAATTCCACCCCTGCGCAAAATGCTGGGTATTGGCGGAGACAGGAC
AGAAAAATTAATACCGGGAATTCCGGGCTGTTAAGGATGGCATCGTTTGG
GTCCATGAAGATGGCGCCACTGATGCTCCTTCAACTTTTGGGACGCGGAA
CCCTAACAATGATTCAGCTATTGTTACACAATTCGCGCCCGGTACTAAGC
TTCCTAAAAACTTCCACATTGAGGGGACTGGAGGCAATAGTCAATCATCT
TCAAGAGCCTCTAGCGCAAGCAGAAACTCTTCCAGATCTAGTTCACAAGG
TTCAAGATCAGGAAACTCTACCCGCGGCACTTCTCCAGGTCCATCTGGAA
TCGGAGCAG

[0110] Accordingly, preferably the MERS ORF8b polypeptide is encoded by the DNA nucleotide sequence substantially as set out in SEQ ID NO: 37, or a variant or fragment thereof.

[0111] Thus, the RNA construct may comprise an RNA nucleotide sequence of SEQ ID No: 38, as follows:

[SEQ ID No: 38]
AUGCCAAUUCCACCCCUGCGCAAAAUGCUGGGUAUUGGCGGAGACAGGAC
AGAAAAAUUAAUACCGGGAAUGGAAUUAAGCAACUGGCUCCCAGGUGGUA
CUUCUACUACACUGGAACUGGACCCGAAGCAGCACUCCCAUUCCGGGCUG
UUAAGGAUGGCAUCGUUUGGGUCCAUGAAGAUGGCGCCACUGAUGCUCCU
UCAACUUUUGGGACGCGGAACCCUAACAAUGAUUCAGCUAUUGUUACACA
AUUCGCGCCCGGUACUAAGCUUCCUAAAAACUUCCACAUUGAGGGGACUG
GAGGCAAUAGUCAAUCAUCUUCAAGAGCCUCUAGCGCAAGCAGAAACUCU
UCCAGAUCUAGUUCACAAGGUUCAAGAUCAGGAAACUCUACCCGCGGCAC
UUCUCCAGGUCCAUCUGGAAUCGGAGCAG

[0112] Furthermore, preferably the RNA construct comprises an RNA nucleotide sequence substantially as set out in SEQ ID No: 38, or a variant or fragment thereof.

[0113] The inventors then subjected the protein sequence of SEQ ID No: 36 to codon optimisation for human expression, and one embodiment of the codon optimised nucleic acid (DNA) sequence that includes a start (ATG) and a stop (TGA) codon is provided herein as SEQ ID No: 39, as follows:

[SEQ ID No: 39]
ATGCCCATTCCTCCACTGAGAAAGATGCTCGGCATCGGCGGCGACAGAAC
CGAGAAGCTGATCCCTGGCATGGAACTGAGCAACTGGCTGCCTGGCGGCA
CCAGCACAACACTGGAACTGGATCCTAAGCAGCACAGCCACAGCGGCCTG
CTGAGAATGGCCAGCTTTGGCAGCATGAAGATGGCCCCTCTGATGCTGCT
GCAGCTGCTCGGAAGAGGCACCCTGACAATGATCCAGCTGCTGCTCCACA
ACAGCAGACCCGTGCTGAGCTTCCTGAAAACCAGCACACTGAGAGGCCTG
GAAGCCATCGTGAACCATCTGCAAGAGCCCCTGGCTCAGGCCGAGACACT
GCCTGATCTGGTGCACAAGGIGCAGGACCAAGAAACCCTGCCTGCCGCTC
TGCTGCAGGTCCACCTGGAATCTGAGCAGTGA

[0114] Hence, preferably the RNA construct is encoded by a DNA sequence substantially as set out in SEQ ID No: 39, or a fragment or variant thereof.

[0115] In an embodiment, the RNA sequence corresponding to the codon optimised DNA sequence of SEQ ID No: 39 that includes a start (AUG) and a stop (UGA) codon is provided herein as SEQ ID No: 40, as follows:

[SEQ ID No: 40]
AUGCCCAUUCCUCCACUGAGAAAGAUGCUCGGCAUCGGCGGCGACAGAAC
CGAGAAGCUGAUCCCUGGCAUGGAACUGAGCAACUGGCUGCCUGGCGGCA
CCAGCACAACACUGGAACUGGAUCCUAAGCAGCACAGCCACAGCGGCCUG
CUGAGAAUGGCCAGCUUUGGCAGCAUGAAGAUGGCCCCUCUGAUGCUGCU
GCAGCUGCUCGGAAGAGGCACCCUGACAAUGAUCCAGCUGCUGCUCCACA
ACAGCAGACCCGUGCUGAGCUUCCUGAAAACCAGCACACUGAGAGGCCUG
GAAGCCAUCGUGAACCAUCUGCAAGAGCCCCUGGCUCAGGCCGAGACACU
GCCUGAUCUGGUGCACAAGGUGCAGGACCAAGAAACCCUGCCUGCCGCUC
UGCUGCAGGUCCACCUGGAAUCUGAGCAGUGA

[0116] Hence, preferably the RNA construct comprises a sequence substantially as set out in SEQ ID No: 40, or a fragment or variant thereof.

[0117] In one embodiment, the at least one IIP may be KSHV ORF52 (Kaposi's sarcoma-associated herpesvirus ORF52; Accession Number—Genomic DNA Translation: ACY00451.1; UniProtKB—F5HBL8 (F5HBL8_HHV8)), or an orthologue thereof. ORF52 protein of Kaposi's sarcoma-associated herpesvirus (KSHV) is believed to directly inhibit cGAS enzymatic activity and thus prevent generation of the signalling molecule cGAMP by binding to both cGAS and DNA. (Wu J-J, Li W, Shao Y, Avey D et al. (2015) Inhibition of cGAS DNA Sensing by a Herpesvirus Virion Protein. Cell Host Microbe. 18, 3, 333-344. doi: 10.1016/j.chom.2015.07.015.).

[0118] One embodiment of the KSHV ORF52 polypeptide sequence is represented herein as SEQ ID No:41, as follows:

[SEQ ID No: 41]
MAAPRGRPKKDLTMEDLTAKISQLTVENRELRKALGSTADPRDRPLTATE
KEAQLTATVGALSAAAAKKIEARVRTIFSKVVTQKQVDDALKGLSLRIDV
CMSDGGTAKPPPGANNRRRRGASTTRAGVDD

[0119] Therefore, preferably the RNA construct of the first aspect comprises a nucleotide sequence which encodes an amino acid sequence substantially as set out in SEQ ID No: 41, or a variant or fragment thereof.

[0120] In one embodiment, the KSHV ORF52 polypeptide is encoded by the DNA nucleotide sequence of SEQ ID No: 42, as follows:

[SEQ ID No: 42]
ATGGCCGCGCCCAGGGGCAGACCCAAAAAGGACCTTACGATGGAAGACCT
AACCGCAAAGATAAGCCAATTGACTGTGGAGAATCGGGAGCTTCGGAAAG
CACTGGGATCCACTGCCGATCCGAGAGATCGGCCTCTGACGGCCACCGAG
AAGGAAGCGCAGCTTACCGCTACTGTGGGTGCACTGAGTGCGGCGGCCGC
TAAGAAAATCGAAGCCAGGGTCAGGACAATATTCAGCAAGGTTGTAACAC
AAAAGCAAGTGGACGATGCCCTGAAGGGACTTTCGCTTAGAATCGACGTC
TGCATGTCAGACGGGGGCACCGCTAAACCGCCTCCTGGTGCCAATAACAG
GCGACGAAGAGGAGCCTCGACAACACGGGCGGGGGTTGATGAC

[0121] Accordingly, preferably the KSHV ORF52 polypeptide is encoded by the DNA nucleotide sequence substantially as set out in SEQ ID NO: 42, or a variant or fragment thereof.

[0122] Thus, the RNA construct may comprise an RNA nucleotide sequence of SEQ ID No: 43, as follows:

[SEQ ID No: 43]
AUGGCCGCGCCCAGGGGCAGACCCAAAAAGGACCUUACGAUGGAAGACCU
AACCGCAAAGAUAAGCCAAUUGACUGUGGAGAAUCGGGAGCUUCGGAAAG
CACUGGGAUCCACUGCCGAUCCGAGAGAUCGGCCUCUGACGGCCACCGAG
AAGGAAGCGCAGCUUACCGCUACUGUGGGUGCACUGAGUGCGGCGGCCGC
UAAGAAAAUCGAAGCCAGGGUCAGGACAAUAUUCAGCAAGGUUGUAACAC
AAAAGCAAGUGGACGAUGCCCUGAAGGGACUUUCGCUUAGAAUCGACGUC
UGCAUGUCAGACGGGGGCACCGCUAAACCGCCUCCUGGUGCCAAUAACAG
GCGACGAAGAGGAGCCUCGACAACACGGGCGGGGGUUGAUGAC

[0123] Furthermore, preferably the RNA construct comprises an RNA nucleotide sequence substantially as set out in SEQ ID No: 43, or a variant or fragment thereof.

[0124] The inventors then subjected the protein sequence of SEQ ID No: 41 to codon optimisation for human expression, and one embodiment of the codon optimised nucleic acid (DNA) sequence that includes a start (ATG) and a stop (TGA) codon is provided herein as SEQ ID No: 44, as follows:

[SEQ ID No: 44]
ATGGCTGCTCCTAGAGGCAGACCCAAGAAAGACCTGACCATGGAAGATCT
GACCGCCAAGATCAGCCAGCTGACCGTGGAAAACAGAGAGCTGAGAAAGG
CCCTGGGCAGCACCGCCGATCCTAGAGATAGACCTCTGACAGCCACCGAG
AAAGAGGCCCAGCTGACAGCTACAGTGGGAGCCCTTTCTGCCGCCGCTGC
CAAGAAAATTGAAGCCAGAGTGCGGACCATCTTCAGCAAGGTGGTCACCC
AGAAACAGGTGGACGATGCCCTGAAGGGCCTGAGCCTGAGAATCGACGTG
TGTATGTCTGACGGCGGCACCGCCAAACCTCCACCTGGCGCTAACAACAG
AAGAAGAAGAGGCGCCAGCACCACCAGAGCTGGCGTGGACGATTGA

[0125] Hence, preferably the RNA construct is encoded by a DNA sequence substantially as set out in SEQ ID No: 44, or a fragment or variant thereof.

[0126] In an embodiment, the RNA sequence corresponding to the codon optimised DNA sequence of SEQ ID No: 44 that includes a start (AUG) and a stop (UGA) codon is provided herein as SEQ ID No: 45, as follows:

[SEQ ID No: 45]
AUGGCUGCUCCUAGAGGCAGACCCAAGAAAGACCUGACCAUGGAAGAUCU
GACCGCCAAGAUCAGCCAGCUGACCGUGGAAAACAGAGAGCUGAGAAAGG
CCCUGGGCAGCACCGCCGAUCCUAGAGAUAGACCUCUGACAGCCACCGAG
AAAGAGGCCCAGCUGACAGCUACAGUGGGAGCCCUUUCUGCCGCCGCUGC
CAAGAAAAUUGAAGCCAGAGUGCGGACCAUCUUCAGCAAGGUGGUCACCC
AGAAACAGGUGGACGAUGCCCUGAAGGGCCUGAGCCUGAGAAUCGACGUG
UGUAUGUCUGACGGCGGCACCGCCAAACCUCCACCUGGCGCUAACAACAG
AAGAAGAAGAGGCGCCAGCACCACCAGAGCUGGCGUGGACGAUUGA

[0127] Hence, preferably the RNA construct comprises a sequence substantially as set out in SEQ ID No: 45, or a fragment or variant thereof.

[0128] In one embodiment, the at least one IIP may be Ebola VP35 (EBOV VP35; NP_066244.1; Accession Number—NCBI Reference Sequence: NC_002549.1; UniProtKB—Q05127 (VP35_EBOZM)), or an orthologue thereof. Ebola virus VP35 protein is thought to (amongst other effects on innate signalling cascades) bind to the cellular protein PACT, a cellular dsRNA binding protein required for activation of RIG-I, inhibit IRF3 and IRF7 activity (Luthra P, Raman P, Mire C E, Weisand C, Isuda Y et al. (2013) Mutual antagonism between Ebola virus VP35 protein and the RIG-I activator PACT determines infection outcome. Cell Host Microbe., 14(1):74-84. doi: 10.1016/j.chom.2013.06.010. Hartman A L, Bird B H, Towner J S, Anoniadou Z-A, Zaki S R, Nichol S T (2008) Inhibition of IRF-3 activation by VP35 is critical for the high level of virulence of Ebola virus. J Virol. 82, 6, 2699-2704. Audet J, Kobinger G P (2015). Immune evasion in ebolavirus infections. Viral Immunol., 28, 1, 10-18.).

[0129] One embodiment of the Ebola VP35 polypeptide sequence is represented herein as SEQ ID No:46, as follows:

[SEQ ID No: 46]
MTTRTKGRGHTAATTQNDRMPGPELSGWISEQLMTGRIPVSDIFCDIENN
PGLCYASQMQQTKPNPKTRNSQTQTDPICNHSFEEVVQTLASLATVVQQQ
TIASESLEQRITSLENGLKPVYDMAKTISSLNRVCAEMVAKYDLLVMTTG
RATATAAATEAYWAEHGQPPPGPSLYEESAIRGKIESRDETVPQSVREAF
NNLNSTTSLTEENFGKPDISAKDLRNIMYDHLPGFGTAFHQLVQVICKLG
KDSNSLDIIHAEFQASLAEGDSPQCALIQITKRVPIFQDAAPPVIHIRSR
GDIPRACQKSLRPVPPSPKIDRGWVCVFQLQDGKTLGLKI

[0130] Therefore, preferably the RNA construct of the first aspect comprises a nucleotide sequence which encodes an amino acid sequence substantially as set out in SEQ ID No: 46, or a variant or fragment thereof.

[0131] In one embodiment, the Ebola VP35 polypeptide is encoded by the DNA nucleotide sequence of SEQ ID No: 47, as follows:

[SEQ ID No: 47]
ATGACAACTAGAACAAAGGGCAGGGGCCATACTGCGGCCACGACTCAAAA
CGACAGAATGCCAGGCCCTGAGCTTTCGGGCTGGATCTCTGAGCAGCTAA
TGACCGGAAGAATTCCTGTAAGCGACATCTTCTGTGATATTGAGAACAAT
CCAGGATTATGCTACGCATCCCAAATGCAACAAACGAAGCCAAACCCGAA
GACGCGCAACAGTCAAACCCAAACGGACCCAATTTGCAATCATAGTTTTG
AGGAGGTAGTACAAACATTGGCTTCATTGGCTACTGTTGTGCAACAACAA
ACCATCGCATCAGAATCATTAGAACAACGCATTACGAGTCTTGAGAATGG
TCTAAAGCCAGTTTATGATATGGCAAAAACAATCTCCTCATTGAACAGGG
TTTGTGCTGAGATGGTTGCAAAATATGATCTTCTGGTGATGACAACCGGT
CGGGCAACAGCAACCGCTGCGGCAACTGAGGCTTATTGGGCCGAACATGG
TCAACCACCACCTGGACCATCACTTTATGAAGAAAGTGCGATTCGGGGTA
AGATTGAATCGAGGAAAATTTTGGGAAACCTGACATTTCGGCAAAGGATT
TGAGAAACATTATGTATGATCACTTGCCTGGTTTTGGAACTGCTTTCCAC
CAATTAGTACAAGTGATTTGTAAATTGGGAAAAGATAGCAACTCATTGGA
CATCATTCATGCTGAGTTCCAGGCCAGCCTGGCTGAAGGAGACTCTCCTC
AATGTGCCCTAATTCAAATTACAAAAAGAGTTCCAATCTTCCAAGATGCT
GCTCCACCTGTCATCCACATCCGCTCTCGAGGTGACATTCCCCGAGCTTG
CCAGAAAAGCTTGCGTCCAGTCCCACCATCGCCCAAGATTGATCGAGGTT
GGGTATGTGTTTTTCAGCTTCAAGATGGTAAAACACTTGGACTCAAAATT

[0132] Accordingly, preferably the Ebola VP35 polypeptide is encoded by the DNA nucleotide sequence substantially as set out in SEQ ID NO: 47, or a variant or fragment thereof.

[0133] Thus, the RNA construct may comprise an RNA nucleotide sequence of SEQ ID No: 48, as follows:

[SEQ ID No: 48]
AUGACAACUAGAACAAAGGGCAGGGGCCAUACUGCGGCCACGACUCAAAA
CGACAGAAUGCCAGGCCCUGAGCUUUCGGGCUGGAUCUCUGAGCAGCUAA
UGACCGGAAGAAUUCCUGUAAGCGACAUCUUCUGUGAUAUUGAGAACAAU
CCAGGAUUAUGCUACGCAUCCCAAAUGCAACAAACGAAGCCAAACCCGAA
GACGCGCAACAGUCAAACCCAAACGGACCCAAUUUGCAAUCAUAGUUUUG
AGGAGGUAGUACAAACAUUGGCUUCAUUGGCUACUGUUGUGCAACAACAA
ACCAUCGCAUCAGAAUCAUUAGAACAACGCAUUACGAGUCUUGAGAAUGG
UCUAAAGCCAGUUUAUGAUAUGGCAAAAACAAUCUCCUCAUUGAACAGGG
UUUGUGCUGAGAUGGUUGCAAAAUAUGAUCUUCUGGUGAUGACAACCGGU
CGGGCAACAGCAACCGCUGCGGCAACUGAGGCUUAUUGGGCCGAACAUGG
UCAACCACCACCUGGACCAUCACUUUAUGAAGAAAGUGCGAUUCGGGGUA
AGAUUGAAUCUAGAGAUGAGACCGUCCCUCAAAGUGUUAGGGAGGCAUUC
AACAAUCUAAACAGUACCACUUCACUAACUGAGGAAAAUUUUGGGAAACC
UGACAUUUCGGCAAAGGAUUUGAGAAACAUUAUGUAUGAUCACUUGCCUG
GUUUUGGAACUGCUUUCCACCAAUUAGUACAAGUGAUUUGUAAAUUGGGA
AAAGAUAGCAACUCAUUGGACAUCAUUCAUGCUGAGUUCCAGGCCAGCCU
GGCUGAAGGAGACUCUCCUCAAUGUGCCCUAAUUCAAAUUACAAAAAGAG
UUCCAAUCUUCCAAGAUGCUGCUCCACCUGUCAUCCACAUCCGCUCUCGA
GGUGACAUUCCCCGAGCUUGCCAGAAAAGCUUGCGUCCAGUCCCACCAUC
GCCCAAGAUUGAUCGAGGUUGGGUAUGUGUUUUUCAGCUUCAAGAUGGUA
AAACACUUGGACUCAAAAUU

[0134] Furthermore, preferably the RNA construct comprises an RNA nucleotide sequence substantially as set out in SEQ ID No: 48, or a variant or fragment thereof.

[0135] The inventors then subjected the protein sequence of SEQ ID No: 46 to codon optimisation for human expression, and one embodiment of the codon optimised nucleic acid (DNA) sequence that includes a start (ATG) and a stop (TGA) codon is provided herein as SEQ ID No: 49, as follows:

[SEQ ID No: 49]
ATGACCACCAGGACCAAAGGCAGAGGACACACCGCCGCCACCACACAGAA
CGACAGAATGCCTGGACCTGAGCTGAGCGGCTGGATCTCTGAGCAGCTGA
TGACAGGCAGAATCCCCGTGTCCGACATCTTCTGCGACATCGAGAACAAC
CCCGGCCTGTGTTACGCCAGCCAGATGCAGCAGACCAAGCCTAATCCTAA
GACACGGAACAGCCAGACACAGACAGACCCCATCTGCAACCACAGCTTCG
AGGAAGTGGTGCAGACACTGGCCAGCCTGGCCTGAAGCCTGTGTACGACA
TGGCCAAGACCATCAGCTCCCTGAACAGAGTGTGCGCCGAGATGGTGGCC
AAATACGACCTGCTCGTGATGACCACCGGCAGAGCCACAGCTACAGCCGC
TGCCACAGAAGCCTATTGGGCCGAACATGGACAGCCTCCACCTGGACCTA
GCCTGTACGAGGAATCTGCCATCCGGGGCAAGATCGAGAGCAGGGATGAG
ACAGTGCCCCAGTCTGTGCGCGAGGCCTTCAACAACCTGAACAGCACCAC
AAGCCTGACCGAGGAAAACTTCGGCAAGCCCGACATCAGCGCCAAGGACC
TGCGGAACATTATGTACGACCATCTGCCTGGCTTCGGCACCGCCTTCCAT
CAGCTGGTGCAAGTGATCTGCAAGCTGGGCAAAGACAGCAACAGCCTGGA
CATCATCCACGCCGAGTTTCAGGCCTCTCTGGCCGAAGGCGATTCTCCTC
AGTGTGCCCTGATCCAGATCACCAAGCGGGTGCCCATCTTCCAGGATGCT
GCCCCTCCTGTGATCCACATCAGAAGCAGAGGCGACATCCCCAGAGCCTG
CCAGAAATCTCTCAGACCCGTGCCTCCATCTCCTAAGATCGACAGAGGCT
GGGTCTGCGTGTTCCAGCTGCAAGATGGCAAGACCCTGGGCCTGAAGATC
TGA

[0136] Hence, preferably the RNA construct comprises a sequence substantially as set out in SEQ ID No: 49, or a fragment or variant thereof.

[0137] In an embodiment, the RNA sequence corresponding to the codon optimised DNA sequence of SEQ ID No: 49 that includes a start (AUG) and a stop (UGA) codon is provided herein as SEQ ID No: 50, as follows:

[SEQ ID No: 50]
AUGACCACCAGGACCAAAGGCAGAGGACACACCGCCGCCACCACACAGAA
CGACAGAAUGCCUGGACCUGAGCUGAGCGGCUGGAUCUCUGAGCAGCUGA
UGACAGGCAGAAUCCCCGUGUCCGACAUCUUCUGCGACAUCGAGAACAAC
CCCGGCCUGUGUUACGCCAGCCAGAUGCAGCAGACCAAGCCUAAUCCUAA
GACACGGAACAGCCAGACACAGACAGACCCCAUCUGCAACCACAGCUUCG
AGGAAGUGGUGCAGACACUGGCCAGCCUGGCUACAGUUGUGCAGCAGCAG
ACAAUCGCCAGCGAGAGCCUGGAACAGAGAAUCACCAGCCUGGAAAACGG
CCUGAAGCCUGUGUACGACAUGGCCAAGACCAUCAGCUCCCUGAACAGAG
UGUGCGCCGAGAUGGUGGCCAAAUACGACCUGCUCGUGAUGACCACCGGC
AGAGCCACAGCUACAGCCGCUGCCACAGAAGCCUAUUGGGCCGAACAUGG
ACAGCCUCCACCUGGACCUAGCCUGUACGAGGAAUCUGCCAUCCGGGGCA
AGAUCGAGAGCAGGGAUGAGACAGUGCCCCAGUCUGUGCGCGAGGCCUUC
AACAACCUGAACAGCACCACAAGCCUGACCGAGGAAAACUUCGGCAAGCC
CGACAUCAGCGCCAAGGACCUGCGGAACAUUAUGUACGACCAUCUGCCUG
GCUUCGGCACCGCCUUCCAUCAGCUGGUGCAAGUGAUCUGCAAGCUGGGC
AAAGACAGCAACAGCCUGGACAUCAUCCACGCCGAGUUUCAGGCCUCUCU
GGCCGAAGGCGAUUCUCCUCAGUGUGCCCUGAUCCAGAUCACCAAGCGGG
UGCCCAUCUUCCAGGAUGCUGCCCCUCCUGUGAUCCACAUCAGAAGCAGA
GGCGACAUCCCCAGAGCCUGCCAGAAAUCUCUCAGACCCGUGCCUCCAUC
UCCUAAGAUCGACAGAGGCUGGGUCUGCGUGUUCCAGCUGCAAGAUGGCA
AGACCCUGGGCCUGAAGAUCUGA

[0138] Hence, preferably the RNA construct comprises a sequence substantially as set out in SEQ ID No: 50, or a fragment or variant thereof.

[0139] In another embodiment, the at least one IIP may be derived from SARS-CoV-2 ORF3b (Accession Number—NCBI Reference Sequence: NC_045512.2) or an orthologue thereof. One embodiment of the wild type of SARS-CoV-2 ORF3b polypeptide sequence from which the at least one IIP may be derived is represented herein as SEQ ID No:51. The asterisks represent stop codons in the wild-type sequence, one or more of which may be mutated in the derived IIP. SEQ ID No:51 is as follows:

[SEQ ID No: 51]
MMPTIFFAGILIVTTIVYLTIV*LLQLSLLQVMAQQVLFLNMTTRLVVIL
KNGNLE*KTVLYYTVTSLQTITSCTQLN*VQTLVLNMLPSSSTIKLLMSL
KNMSKFTQSTVHPELLIQ*WNQFMMNRRRLLACLCKHKLMSTNLCTHSFR
KRQVR*

[0140] In one embodiment, the at least one IIP may be an ORF3b*57 variant of the wild type of SARS-CoV-2 ORF3b, or an orthologue thereof. One embodiment of the SARS-CoV-2 ORF3b*57 variant polypeptide sequence is represented herein as SEQ ID No:52, as follows:

[SEQ ID No: 52]
MMPTIFFAGILIVTTIVYLTIVQLLQLSLLQVMAQQVLFLNMTTRLVVIL
KNGNLE

[0141] Therefore, preferably the RNA construct of the first aspect comprises a nucleotide sequence which encodes an amino acid sequence substantially as set out in SEQ ID No: 52, or a variant or fragment thereof.

[0142] In one embodiment, the SARS-CoV-2 ORF3b*57 variant polypeptide is encoded by the DNA nucleotide sequence of SEQ ID No: 53, as follows:

[SEQ ID No: 53]
ATGATGCCAACTATTTTCTTTGCTGGCATACTAATTGTTACGACTATTGT
ATACCTTACAATAGTGCAACTTCTTCAATTGTCATTACTTCAGGTGATGG
CACAACAAGTCCTATTTCTGAACATGACTACCAGATTGGTGGTTATACTG
AAAAATGGGAATCTGGAG

[0143] Accordingly, preferably the SARS-CoV-2 ORF3b*57 variant polypeptide is encoded by the DNA nucleotide sequence substantially as set out in SEQ ID NO: 53, or a variant or fragment thereof.

[0144] Thus, the RNA construct may comprise an RNA nucleotide sequence of SEQ ID No: 54, as follows:

[SEQ ID No: 54]
AUGAUGCCAACUAUUUUCUUUGCUGGCAUACUAAUUGUUACGACUAUUGU
AUACCUUACAAUAGUGCAACUUCUUCAAUUGUCAUUACUUCAGGUGAUGG
CACAACAAGUCCUAUUUCUGAACAUGACUACCAGAUUGGUGGUUAUACUG
AAAAAUGGGAAUCUGGAG

[0145] Furthermore, preferably the RNA construct comprises an RNA nucleotide sequence substantially as set out in SEQ ID No: 54, or a variant or fragment thereof.

[0146] The inventors then subjected the protein sequence of SEQ ID No: 52 to codon optimisation for human expression, and one embodiment of the codon optimised nucleic acid (DNA) sequence that includes a start (ATG) and a stop (TGA) codon is provided herein as SEQ ID No: 55, as follows:

[SEQ ID No: 55]
ATGATGCCGACCATCTTCTTCGCCGGCATCCTGATCGTGACCACCATCGT
GTACCTGACCATCGTGCAGCTGCTGCAGCTCAGCCTGCTGCAAGTGATGG
CTCAGCAGGTCCTGTTCCTGAATATGACCACCAGACTGGTCGTGATCCTG
AAGAACGGCAACCTGGAATGA

[0147] Hence, preferably the RNA construct is encoded by a DNA sequence substantially as set out in SEQ ID No: 55, or a fragment or variant thereof.

[0148] In an embodiment, the RNA sequence corresponding to the codon optimised DNA is sequence of SEQ ID No: 55 that includes a start (AUG) and a stop (UGA) codon is provided herein as SEQ ID No: 56, as follows:

[SEQ ID No: 56]
AUGAUGCCGACCAUCUUCUUCGCCGGCAUCCUGAUCGUGACCACCAUCGU
GUACCUGACCAUCGUGCAGCUGCUGCAGCUCAGCCUGCUGCAAGUGAUGG
CUCAGCAGGUCCUGUUCCUGAAUAUGACCACCAGACUGGUCGUGAUCCUG
AAGAACGGCAACCUGGAAUGA

[0149] Hence, preferably the RNA construct comprises a sequence substantially as set out in SEQ ID No: 56, or a fragment or variant thereof.

[0150] In another embodiment, the at least one IIP may be an ORF3b*79 variant of the wild type of SARS-CoV-2 ORF3b, or an orthologue thereof. One embodiment of the SARS-CoV-2 ORF3b*79 variant polypeptide sequence is represented herein as SEQ ID No:57, as follows:

[SEQ ID No: 57]
MMPTIFFAGILIVTTIVYLTIVQLLQLSLLQVMAQQVLFLNMTTRLVVIL
KNGNLELKTVLYYTVTSLQTITSCTQLN

[0151] Therefore, preferably the RNA construct of the first aspect comprises a nucleotide sequence which encodes an amino acid sequence substantially as set out in SEQ ID No: 57, or a variant or fragment thereof.

[0152] In one embodiment, the SARS-CoV-2 ORF3b*79 variant polypeptide is encoded by the DNA nucleotide sequence of SEQ ID No: 58, as follows:

[SEQ ID No: 58]
ATGATGCCAACTATTTTCTTTGCTGGCATACTAATTGTTACGACTATTGT
ATACCTTACAATAGTGCAACTTCTTCAATTGTCATTACTTCAGGTGATGG
CACAACAAGTCCTATTTCTGAACATGACTACCAGATTGGTGGTTATACTG
AAAAATGGGAATCTGGAGTTAAAGACTGTGTTGTATTACACAGTTACTTC
ACTTCAGACTATTACCAGCTGTACTCAACTCAAT

[0153] Accordingly, preferably the SARS-CoV-2 ORF3b*79 variant polypeptide is encoded by the DNA nucleotide sequence substantially as set out in SEQ ID NO: 58, or a variant or fragment thereof.

[0154] Thus, the RNA construct may comprise an RNA nucleotide sequence of SEQ ID No: 59, as follows:

[SEQ ID No: 59]
AUGAUGCCAACUAUUUUCUUUGCUGGCAUACUAAUUGUUACGACUAUUGU
AUACCUUACAAUAGUGCAACUUCUUCAAUUGUCAUUACUUCAGGUGAUGG
CACAACAAGUCCUAUUUCUGAACAUGACUACCAGAUUGGUGGUUAUACUG
AAAAAUGGGAAUCUGGAGUUAAAGACUGUGUUGUAUUACACAGUUACUUC
ACUUCAGACUAUUACCAGCUGUACUCAACUCAAU

[0155] Furthermore, preferably the RNA construct comprises an RNA nucleotide sequence substantially as set out in SEQ ID No: 59, or a variant or fragment thereof.

[0156] The inventors then subjected the protein sequence of SEQ ID No: 57 to codon optimisation for human expression, and one embodiment of the codon optimised nucleic acid (DNA) sequence that includes a start (ATG) and a stop (TGA) codon is provided herein as SEQ ID No: 60, as follows:

[SEQ ID No: 60]
ATGATGCCGACCATCTTCTTCGCCGGCATCCTGATCGTGACCACCATCGT
GTACCTGACCATCGTGCAGCTGCTGCAGCTCAGCCTGCTGCAAGTGATGG
CTCAGCAGGTCCTGTTCCTGAATATGACCACCAGACTGGTCGTGATCCTG
AAGAACGGCAACCTGGAACTGAAAACCGTGCTGTACTACACCGTGACCAG
CCTGCAGACCATCACCAGCTGCACCCAGCTGAACTGA

[0157] Hence, preferably the RNA construct is encoded by a DNA sequence substantially as set out in SEQ ID No: 60, or a fragment or variant thereof.

[0158] In an embodiment, the RNA sequence corresponding to the codon optimised DNA sequence of SEQ ID No: 60 that includes a start (AUG) and a stop (UGA) codon is provided herein as SEQ ID No: 61, as follows:

[SEQ ID No: 61]
AUGAUGCCGACCAUCUUCUUCGCCGGCAUCCUGAUCGUGACCACCAUCGU
GUACCUGACCAUCGUGCAGCUGCUGCAGCUCAGCCUGCUGCAAGUGAUGG
CUCAGCAGGUCCUGUUCCUGAAUAUGACCACCAGACUGGUCGUGAUCCUG
AAGAACGGCAACCUGGAACUGAAAACCGUGCUGUACUACACCGUGACCAG
CCUGCAGACCAUCACCAGCUGCACCCAGCUGAACUGA

[0159] Hence, preferably the RNA construct comprises a sequence substantially as set out in SEQ ID No: 61, or a fragment or variant thereof.

[0160] In yet another embodiment, the at least one IIP may be an ORF3b*57 Ecuador variant of the wild type of SARS-CoV-2 ORF3b, or an orthologue thereof. One embodiment of the SARS-CoV-2 ORF3b*57 Ecuador variant polypeptide sequence is represented herein as SEQ ID No:62, as follows:

[SEQ ID No: 62]
MMPTIFFAGILIVTTIVYLTIVQMLQLSLLQVMAQQVLFLNMTTRLVVIL
KNGNLE

[0161] Therefore, preferably the RNA construct of the first aspect comprises a nucleotide sequence which encodes an amino acid sequence substantially as set out in SEQ ID No: 62, or a variant or fragment thereof.

[0162] In one embodiment, the SARS-CoV-2 ORF3b*57 Ecuador variant polypeptide is encoded by the DNA nucleotide sequence of SEQ ID No: 63, as follows:

[SEQ ID No: 63]
ATGATGCCAACTATTTTCTTTGCTGGCATACTAATTGTTACGACTATTGT
ATACCTTACAATAGTGCAAATGCTTCAATTGTCATTACTTCAGGTGATGG
CACAACAAGTCCTATTTCTGAACATGACTACCAGATTGGTGGTTATACTG
AAAAATGGGAATCTGGAGTAA

[0163] Accordingly, preferably the SARS-CoV-2 ORF3b*57 Ecuador variant polypeptide is encoded by the DNA nucleotide sequence substantially as set out in SEQ ID NO: 63, or a variant or fragment thereof.

[0164] Thus, the RNA construct may comprise an RNA nucleotide sequence of SEQ ID No: 64, as follows:

[SEQ ID No: 64]
AUGAUGCCAACUAUUUUCUUUGCUGGCAUACUAAUUGUUACGACUAUUGU
AUACCUUACAAUAGUGCAAAUGCUUCAAUUGUCAUUACUUCAGGUGAUGG
CACAACAAGUCCUAUUUCUGAACAUGACUACCAGAUUGGUGGUUAUACUG
AAAAAUGGGAAUCUGGAGUAA

[0165] Furthermore, preferably the RNA construct comprises an RNA nucleotide sequence substantially as set out in SEQ ID No: 64, or a variant or fragment thereof.

[0166] The inventors then subjected the protein sequence of SEQ ID No: 62 to codon optimisation for human expression, and one embodiment of the codon optimised nucleic acid (DNA) sequence that includes a start (ATG) and a stop (TGA) codon is provided herein as SEQ ID No: 65, as follows:

[SEQ ID No: 65]
ATGATGCCGACCATCTTCTTCGCCGGCATCCTGATCGTGACCACCATCGT
GTACCTGACCATCGTGCAGATGCTGCAGCTGAGCCTGCTGCAAGTGATGG
CCCAGCAGGTCCTGTTCCTGAATATGACCACCAGACTGGTCGTGATCCTG
AAGAACGGCAACCTGGAATGA

[0167] Hence, preferably the RNA construct is encoded by a DNA sequence substantially as set out in SEQ ID No: 65, or a fragment or variant thereof.

[0168] In an embodiment, the RNA sequence corresponding to the codon optimised DNA sequence of SEQ ID No: 65 that includes a start (AUG) and a stop (UGA) codon is provided herein as SEQ ID No: 66, as follows:

[SEQ ID No: 66]
AUGAUGCCGACCAUCUUCUUCGCCGGCAUCCUGAUCGUGACCACCAUCGU
GUACCUGACCAUCGUGCAGAUGCUGCAGCUGAGCCUGCUGCAAGUGAUGG
CCCAGCAGGUCCUGUUCCUGAAUAUGACCACCAGACUGGUCGUGAUCCUG
AAGAACGGCAACCUGGAAUGA

[0169] Hence, preferably the RNA construct comprises a sequence substantially as set out in SEQ ID No: 66, or a fragment or variant thereof.

[0170] In other embodiments, the at least one IIP may be a viral inhibitory protein which blocks or inhibits the activity of MDA-5, and selected from a group consisting of:
[0171] (i) a Paromyxoviridae V protein; optionally SV5B, PIV2, Mumps, SeV, Measles, or NiV;
[0172] (ii) Encephalomyocarditis virus 2C;
[0173] (iii) Birnavirus VP3; and
[0174] (iv) Porcine delta coronavirus NS6.

[0175] In other embodiments, the at least one IIP may be an Arenavirus Z protein selected from a group consisting of: LASV; DANV; LCMV; LUJV; CHPV; MACV; GTOV; JUNV; and SABV. These IIPs are believed to interact with the RLR, RIG-I and MDA-5 and inhibit interaction with mitochondrial antiviral signaling (MAVS).

[0176] In other embodiments, the at least one IIP may be a 3C protease protein selected from a group consisting of: Cosackieviruses CV-A16 or CV-A6; EV D-68 or 71; and Poliovirus HEV-C. These IIPs are believed to inhibit MDA interaction with MAVS.

[0177] In other embodiments, the at least one IIP may be a 2A protease protein selected from a group consisting of: Poliovirus HEV-C; CVB3; and EV71. These IIPs are believed to inhibit the RLR pathway by cleavage of MDA-5 and MAVS.

[0178] In other embodiments, the at least one IIP may be a protein degrading or acting on RIG-I and selected from a group consisting of: hMPV G; CVB3 3C protease; Polio Virus 3Cpro; Hepatitis C NS3/4A; DENV NS3; EV71 3Cpro; FMDV Lpro and 3Cpro; Toscana Virus NSS; Influenza A/PR/8/34 NS1; and MERS ORF8b. These IIPs are preferred in the embodiment in which the RNA construct comprises saRNA or mRNA.

[0179] In other embodiments, the at least one IIP may be a protein acting on PACT selected from a group consisting of: SARS CoV N protein; and MHV N.

[0180] In other embodiments, the at least one IIP may be a protein acting against LGP2 (which enhances MDA2 signalling), including, for example, FMDV Lpro, 3Cpro and 2B.

[0181] In other embodiments, the at least one IIP may be a protein that impacts activity of TRAF3, including, for example, MERS CoV M.

[0182] In other embodiments, the at least one IIP may be a protein which acts on MAVS selected from a group consisting of: Influenza virus A PB1-F2; Hepatitis A ABC; Hepatitis B X; Hepatitis C NS3/4A; SARS-CoV NSP15; SARS CoV ORF9 (96); Coxsackievirus B3 2Apro and 3Cpro; Rhinovirus 2Apro and 3Cpro; Rotavirus VP3; GB Virus B NS3/4A; EV71 2Apro; HAV 3Cpro; Human metapneumovirus M2-2; and Enterovirus EV71 2A.

[0183] In other embodiments, the at least one IIP may be a protein that blocks IRF-3 activity selected from a group consisting of: HCV and NSP1B; Ebola vNS3; HPV16 E6; Hepatitis E methyltransferase; PRV Npro; HSV1 Us3; HSV2 Us1; CSFV Npro; BDV Npro; Bovine RV NS1 and NS2; Hepatitis B virus Orf3; PBoV NP1; Hepatitis E ORF3; and MERS ORF8b.

[0184] In other embodiments, the at least one IIP may be a protein that inhibits IRF7 activity selected from a group consisting of: Rotavirus NSP1; KSHV ORF45; EBV BZLF-1; Ebola VP35; and Enterovirus 71 and 68 3CPro.

[0185] In other embodiments, the at least one IIP may be a protein that impacts NF-kβ activity selected from a group consisting of: Polio 3C; FMDV Lpro; MERS CoV ORF4b (246aa); MuHV ORF73; Torque Teno virus ORF2; EBV EBNA1; and SV5 and hPIV2 Vproteins.

[0186] In other embodiments, the at least one IIP may be a protein that impacts TBK-1 or IKKε activities and selected from a group consisting of: BDV P; HPV E6 and HPV E7; Arenavirus NP1; HCV NS3 protein; DENV1 NS4A; DENV1, 2 and 4 NS2A and NS2B; WNV NS4A; Ebola VP35; Rabies Virus PP; PEDV N protein; and HSV1 ICP27 and VP24.

[0187] In other embodiments, the at least one IIP may be a protein that impacts on the activity of NEMO, such as for example, murine CTMV M45.

[0188] The following viral IIPs are believed to block or inhibit activation of MDA-5.

[0189] The V protein binds to the helicase domain of MDA-5 and blocks its activation by inhibiting dsRNA binding and consequent self-association. (Childs K S, Andresjeva J, Randall R E & Goobourn S (2009) Mechanism of MDA-5 inhibition by paramyxovirus V proteins. J Virol 83, 3, 1465-1473) In one embodiment, the at least one IIP is SV5B, or an orthologue thereof. One embodiment of the polypeptide sequence of Simian Virus (PIV5 Non-structural protein V) is represented herein as SEQ ID No: 95, as follows:

[SEQ ID No: 95]
MDPTDLSFSPDEINKLIETGLNTVEYFTSQQVTGTSSLGKNTIPPGVTGL
LTNAAEAKIQESTNHQKGSVGGGAKPKKPRPKIAIVPADDKTVPGKPIPN
PLLGLDSTPSTQTVLDLSGKTLPSGSYKGVKLAKFGKENLMTRFIEEPRE
NPIATSSPIDFKRGRDIGGFHRREYSIGWVGDEVKVTEWCNPSCSPITAA
ARRFECTCHQCPVTCSECERDT

[0190] Therefore, preferably the RNA construct comprises a nucleotide sequence which encodes an amino acid sequence substantially as set out in SEQ ID No: 95, or a variant or fragment thereof.

[0191] In one embodiment, the SV5B polypeptide is encoded by the DNA nucleotide sequence of SEQ ID No: 96, as follows:

[SEQ ID No: 96]
ATGGATCCCACTGATCTGAGCTTCTCCCCAGATGAGATCAATAAGCTCAT
AGAGACAGGCCTGAATACTGTAGAGTATTTTACTTCCCAACAAGTCACAG
GAACATCCTCTCTTGGAAAGAATACAATACCACCAGGGGTCACAGGACTA
CTAACCAATGCTGCAGAGGCAAAGATCCAAGAGTCAACTAACCATCAGAA
GGGCTCAGTTGGTGGGGGTGCAAAACCAAAGAAACCGCGACCAAAAATTG
CCATTGTGCCAGCAGATGACAAAACAGTGCCCGGAAAGCCGATCCCAAAC
CCTCTATTAGGTCTGGACTCCACCCCGAGCACCCAAACTGTGCTTGATCT
AAGTGGGAAAACATTACCATCAGGATCCTATAAGGGGGTTAAGCTTGCGA
AATTTGGAAAAGAAAATCTGATGACACGGTTCATCGAGGAACCCAGAGAG
AATCCTATCGCAACCAGTTCCCCCATCGATTTTAAGAGGGGCAGGGATAC
CGGCGGGTTCCATAGAAGGGAGTACTCAATCGGATGGGTGGGAGATGAAG
TCAAGGTCACTGAGTGGTGCAATCCATCCTGTTCTCCAATCACCGCTGCA
GCAAGGCGATTTGAATGCACTTGTCACCAGTGTCCAGTCACTTGCTCTGA
ATGTGAACGAGATACT

[0192] Accordingly, preferably the SV5B polypeptide is encoded by the DNA nucleotide sequence substantially as set out in SEQ ID NO: 96, or a variant or fragment thereof.

[0193] One embodiment of codon optimised nucleic acid (DNA) encoding the SV5B polypeptide is provided herein as SEQ ID No: 97, as follows:

[SEQ ID No: 97]
ATGGACCCTACCGACCTGAGCTTCAGCCCCGACGAGATCAACAAGCTGAT
CGAGACAGGCCTGAACACCGTGGAATACTTCACCAGCCAGCAAGTGACCG
GCACAAGCAGCCTGGGCAAGAACACAATTCCTCCAGGCGTGACCGGCCTG
CTGACAAATGCTGCCGAGGCCAAGATCCAAGAGAGCACCAACCACCAGAA
GGGCTCTGTTGGAGGCGGAGCCAAGCCTAAGAAGCCCAGACCTAAGATCG
CCATCGTGCCCGCCGACGATAAGACAGTGCCTGGCAAGCCCATTCCTAAT
CCTCTGCTGGGCCTCGACAGCACCCCTAGCACACAGACAGTGCTGGATCT
GAGCGGCAAGACACTGCCTAGCGGCAGCTATAAGGGCGTGAAGCTGGCCA
AGTTCGGCAAAGAAAACCTGATGACCCGGTTCATCGAGGAACCCAGAGAG
AACCCTATCGCCACCAGCTCTCCCATCGACTTCAAGAGAGGCAGAGACAC
CGGCGGCTTCCACAGAAGAGAGTACAGCATTGGCTGGGTCGGAGATGAAG
TGAAAGTGACCGAGTGGTGCAACCCCAGCTGCAGCCCTATTACAGCCGCC
GCTAGAAGATTCGAGTGCACCTGTCACCAGTGTCCTGTGACCTGTAGCGA
GTGCGAGAGAGACACA

[0194] Hence, preferably the RNA construct is encoded by a DNA sequence substantially as set out in SEQ ID No: 97, or a fragment or variant thereof.

[0195] In an embodiment, the RNA sequence corresponding to the codon optimised DNA

[SEQ ID No: 98]
AUGGACCCUACCGACCUGAGCUUCAGCCCCGACGAGAUCAACAAGCUGAU
CGAGACAGGCCUGAACACCGUGGAAUACUUCACCAGCCAGCAAGUGACCG
GCACAAGCAGCCUGGGCAAGAACACAAUUCCUCCAGGCGUGACCGGCCUG
CUGACAAAUGCUGCCGAGGCCAAGAUCCAAGAGAGCACCAACCACCAGAA
GGGCUCUGUUGGAGGCGGAGCCAAGCCUAAGAAGCCCAGACCUAAGAUCG
CCAUCGUGCCCGCCGACGAUAAGACAGUGCCUGGCAAGCCCAUUCCUAAU
CCUCUGCUGGGCCUCGACAGCACCCCUAGCACACAGACAGUGCUGGAUCU
GAGCGGCAAGACACUGCCUAGCGGCAGCUAUAAGGGCGUGAAGCUGGCCA
AGUUCGGCAAAGAAAACCUGAUGACCCGGUUCAUCGAGGAACCCAGAGAG
AACCCUAUCGCCACCAGCUCUCCCAUCGACUUCAAGAGAGGCAGAGACAC
CGGCGGCUUCCACAGAAGAGAGUACAGCAUUGGCUGGGUCGGAGAUGAAG
UGAAAGUGACCGAGUGGUGCAACCCCAGCUGCAGCCCUAUUACAGCCGCC
GCUAGAAGAUUCGAGUGCACCUGUCACCAGUGUCCUGUGACCUGUAGCGA
GUGCGAGAGAGACACA

[0196] Hence, preferably the RNA construct comprises a sequence substantially as set out in SEQ ID No: 98, or a fragment or variant thereof.

[0197] In one embodiment, the at least one IIP is PIV2 Non-structural protein V (P19847), or an orthologue thereof. One embodiment of the polypeptide sequence of PIV2 is represented herein as SEQ ID No: 99, as follows:

[SEQ ID No: 99]
MAEEPTYTTEQVDELIHAGLGTVDFFLSRPIDAQSSLGKGSIPPGVTAVL
TSAAEAKSKPVAAGPVKPRRKKVISNTTPYTIADNIPPEKLPINTPIPNP
LLPLARPHGKMTDIDIVTGNITEGSYKGVELAKLGKQTLLTRFTSNEPVS
SAGSAQDPNFKRGGANRERARGNHRREWSIAWVGDQVKVFEWCNPRCAPV
TASARKFTCTCGSCPSICGECEGDH

[0198] Therefore, preferably the RNA construct comprises a nucleotide sequence which encodes an amino acid sequence substantially as set out in SEQ ID No: 99, or a variant or fragment thereof.

[0199] In one embodiment, the PIV2 polypeptide is encoded by the DNA nucleotide sequence of SEQ ID No: 100, as follows:

[SEQ ID No: 100]
ATGGCCGAGGAACCAACATACACCACTGAGCAAGTTGATGAATTAATCCA
TGCTGGACTGGGAACAGTAGATTTCTTCCTATCTAGACCCATAGATGCTC
AGTCTTCTTTAGGCAAAGGCAGCATCCCACCAGGTGTCACAGCTGTTCTA
ACTAGTGCAGCGGAGGCAAAATCCAAACCAGTTGCTGCTGGTCCAGTTAA
ACCCAGGCGGAAGAAAGTGATCAGCAATACTACTCCATACACTATTGCAG
ACAATATTCCACCTGAGAAGCTACCGATCAACACTCCAATACCCAATCCA
TTACTTCCACTGGCACGCCCTCACGGAAAGATGACAGACATTGACATTGT
CACTGGGAACATTACAGAAGGATCGTACAAAGGTGTGGAGCTTGCTAAAT
TAGGGAAGCAGACACTACTCACAAGGTTCACCTCGAATGAGCCAGTCTCC
TCAGCTGGATCCGCCCAAGACCCCAACTTTAAGAGGGGGGGAGCTAATAG
AGAAAGAGCAAGAGGCAACCATAGGAGAGAATGGAGTATTGCATGGGTCG
GAGATCAGGTCAAAGTCTTCGAGTGGTGTAATCCCAGGTGTGCCCCAGTC
ACGGCCTCAGCTCGCAAGTTCACCTGCACATGCGGATCCTGCCCCAGCAT
CTGCGGAGAATGTGAAGGAGATCAT

[0200] Accordingly, preferably the PIV2 polypeptide is encoded by the DNA nucleotide sequence substantially as set out in SEQ ID NO: 100, or a variant or fragment thereof.

[0201] One embodiment of codon optimised nucleic acid (DNA) encoding the PIV2 polypeptide is provided herein as SEQ ID No: 101, as follows:

[SEQ ID No: 101]
ATGGCCGAGGAACCTACCTACACCACCGAACAGGTGGACGAGCTGATTCA
CGCCGGACTGGGAACCGTGGACTTCTTTCTGTCCCGGCCTATCGATGCCC
AGAGCAGCCTCGGCAAGGGATCTATTCCTCCTGGCGTGACAGCCGTGCTG
ACATCTGCCGCCGAGGCCAAGTCTAAACCTGTGGCTGCTGGACCCGTGAA
GCCCAGACGGAAGAAAGTGATCAGCAACACCACACCTTACACGATCGCCG
ACAACATCCCTCCTGAGAAGCTGCCCATCAACACCCCTATTCCTAATCCT
CTGCTGCCCCTGGCCAGACCTCACGGCAAGATGACCGACATCGATATCGT
GACCGGCAACATCACCGAGGGCAGCTACAAAGGCGTGGAACTGGCCAAGC
TGGGCAAGCAGACACTGCTGACCAGATTCACCAGCAACGAGCCTGTGTCT
AGCGCCGGCTCTGCCCAGGATCCTAACTTCAAAAGAGGCGGAGCCAACAG
AGAGAGAGCCAGAGGCAACCATCGGAGAGAGTGGTCTATTGCCTGGGTCG
GAGATCAAGTGAAGGTGTTCGAGTGGTGCAACCCCAGATGTGCCCCTGTG
ACAGCCAGCGCCAGAAAGTTCACCTGTACCTGCGGCAGCTGTCCCAGCAT
TTGCGGAGAGTGTGAAGGCGACCAT

[0202] Hence, preferably the RNA construct is encoded by a DNA sequence substantially as set out in SEQ ID No: 101, or a fragment or variant thereof.

[0203] In an embodiment, the RNA sequence corresponding to the codon optimised DNA sequence of SEQ ID No: 101 is provided herein as SEQ ID No: 102, as follows:

[SEQ ID No: 102]
AUGGCCGAGGAACCUACCUACACCACCGAACAGGUGGACGAGCUGAUUCA
CGCCGGACUGGGAACCGUGGACUUCUUUCUGUCCCGGCCUAUCGAUGCCC
AGAGCAGCCUCGGCAAGGGAUCUAUUCCUCCUGGCGUGACAGCCGUGCUG
ACAUCUGCCGCCGAGGCCAAGUCUAAACCUGUGGCUGCUGGACCCGUGAA
GCCCAGACGGAAGAAAGUGAUCAGCAACACCACACCUUACACGAUCGCCG
ACAACAUCCCUCCUGAGAAGCUGCCCAUCAACACCCCUAUUCCUAAUCCU
CUGCUGCCCCUGGCCAGACCUCACGGCAAGAUGACCGACAUCGAUAUCGU
GACCGGCAACAUCACCGAGGGCAGCUACAAAGGCGUGGAACUGGCCAAGC
UGGGCAAGCAGACACUGCUGACCAGAUUCACCAGCAACGAGCCUGUGUCU
AGCGCCGGCUCUGCCCAGGAUCCUAACUUCAAAAGAGGCGGAGCCAACAG
AGAGAGAGCCAGAGGCAACCAUCGGAGAGAGUGGUCUAUUGCCUGGGUCG
GAGAUCAAGUGAAGGUGUUCGAGUGGUGCAACCCCAGAUGUGCCCCUGUG
ACAGCCAGCGCCAGAAAGUUCACCUGUACCUGCGGCAGCUGUCCCAGCAU
UUGCGGAGAGUGUGAAGGCGACCAU

[0204] Hence, preferably the RNA construct comprises a sequence substantially as set out in SEQ ID No: 102, or a fragment or variant thereof.

[0205] In one embodiment, the at least one IIP is Mumps Non-structural protein V (P30928), or an orthologue thereof. One embodiment of the polypeptide sequence of Mumps V protein is represented herein as SEQ ID No: 103, as follows:

[SEQ ID No: 103]
MDQFIKQDETGDLIETGMNVANHFLSAPIQGTNSLSKATIIPGVAPVLIG
NPEQKNIQYPTTSHQGSKSKGRGSGARPIIVSSSEGGTGGTQVPEPLFAQ
TGOGGIVTTVYQDPTIQPTGSYRSVELAKIGKERMINRFVEKPRTSTPVT
EFKRGAGSGCSRPDNPRGGHRREWSLSWVQGEVRVFEWCNPICSPITAAA
RFHSCKCGNCPAKCDQCERDYGPP

[0206] Therefore, preferably the RNA construct comprises a nucleotide sequence which encodes an amino acid sequence substantially as set out in SEQ ID No: 103, or a variant or fragment thereof.

[0207] In one embodiment, the Mumps V polypeptide is encoded by the DNA nucleotide sequence of SEQ ID No: 104, as follows:

[SEQ ID No: 104]
ATGGACCAATTTATAAAACAAGATGAGACTGGTGATTTAATTGAGACAGG
AATGAACGTTGCAAATCATTTCCTATCCGCCCCCATTCAGGGAACCAACT
CGTTGAGCAAGGCCACAATCATCCCTGGCGTTGCACCAGTACTCATTGGC
AATCCAGAGCAAAAGAACATTCAGTACCCCACCACATCACATCAGGGATC
CAAGTCAAAGGGCAGAGGCTCAGGGGCCAGGCCCATCATAGTCTCATCCT
CCGAAGGAGGCACTGGAGGGACTCAGGTTCCTGAGCCCCTTTTCGCACAA
ACAGGACAAGGTGGCATTGTCACCACCGTTTATCAGGATCCAACTATCCA
ACCAACAGGTTCATATCGAAGTGTGGAATTGGCTAAGATAGGAAAAGAGA
GAATGATTAATCGATTTGTTGAAAAACCAAGAACCTCAACGCCGGTAACA
GAATTTAAGAGGGGGGCCGGGAGCGGCTGCTCAAGGCCAGACAATCCAAG
AGGAGGGCATAGACGGGAATGGAGCCTCAGCTGGGTCCAAGGAGAGGTCC
GGGTCTTTGAGTGGTGCAACCCCATATGCTCACCTATCACTGCCGCAGCA
AGATTCCACTCCTGCAAATGTGGGAATTGCCCCGCAAAGTGCGATCAGTG
CGAACGAGATTATGGACCTCCT

[0208] Accordingly, preferably the Mumps V polypeptide is encoded by the DNA nucleotide sequence substantially as set out in SEQ ID NO: 104, or a variant or fragment thereof.

[0209] One embodiment of codon optimised nucleic acid (DNA) encoding the Mumps V polypeptide is provided herein as SEQ ID No: 105, as follows:

[SEQ ID No: 105]
ATGGACCAGTTCATCAAGCAGGACGAGACAGGCGACCTGATCGAAACCGG
CATGAACGTGGCCAACCACTTCCTGTCTGCCCCTATCCAGGGCACCAACA
GCCTGAGCAAGGCCACAATTATCCCTGGCGTGGCCCCTGTGCTGATCGGC
AATCCTGAGCAGAAGAACATTCAGTACCCCACCACCAGCCACCAGGGCAG
CAAGTCTAAAGGCAGAGGCTCTGGCGCTCGGCCCATCATCGTTTCTAGTA
GCGAAGGCGGCACCGGCGGAACACAGGTTCCAGAACCTCTGTTTGCCCAG
ACAGGCCAAGGCGGCATCGTGACCACAGTGTACCAGGATCCTACCATCCA
GCCTACCGGCAGCTACAGAAGCGTGGAACTGGCCAAGATCGGCAAAGAAC
GGATGATCAACCGCTTCGTGGAAAAGCCCAGAACCAGCACACCCGTGACC
GAGTTCAAAAGAGGCGCCGGAAGCGGCTGCAGCAGACCCGATAATCCTAG
AGGCGGCCATCGGAGAGAGTGGTCCCTGTCTTGGGTTCAGGGCGAAGTGC
GGGTGTTCGAGTGGTGCAATCCTATCTGCAGCCCCATCACAGCCGCCGCT
AGATTCCACAGCTGCAAGTGCGGAAACTGCCCCGCCAAGTGTGACCAGTG
CGAGAGAGATTACGGCCCTCCT

[0210] Hence, preferably the RNA construct is encoded by a DNA sequence substantially as set out in SEQ ID No: 105, or a fragment or variant thereof.

[0211] In an embodiment, the RNA sequence corresponding to the codon optimised DNA sequence of SEQ ID No: 105 is provided herein as SEQ ID No: 106, as follows:

[SEQ ID No: 106]
AUGGACCAGUUCAUCAAGCAGGACGAGACAGGCGACCUGAUCGAAACCGGCAUGAACGUGGCCAACCACUUCCUGUCU
GCCCCUAUCCAGGGCACCAACAGCCUGAGCAAGGCCACAAUUAUCCCUGGCGUGGCCCCUGUGCUGAUCGGCAAUCCU
GAGCAGAAGAACAUUCAGUACCCCACCACCAGCCACCAGGGCAGCAAGUCUAAAGGCAGAGGCUCUGGCGCUCGGCCC
AUCAUCGUUUCUAGUAGCGAAGGCGGCACCGGCGGAACACAGGUUCCAGAACCUCUGUUUGCCCAGACAGGCCAAGGC
GGCAUCGUGACCACAGUGUACCAGGAUCCUACCAUCCAGCCUACCGGCAGCUACAGAAGCGUGGAACUGGCCAAGAUC
GGCAAAGAACGGAUGAUCAACCGCUUCGUGGAAAAGCCCAGAACCAGCACACCCGUGACCGAGUUCAAAAGAGGCGCC
GGAAGCGGCUGCAGCAGACCCGAUAAUCCUAGAGGCGGCCAUCGGAGAGAGUGGUCCCUGUCUUGGGUUCAGGGCGAA
GUGCGGGUGUUCGAGUGGUGCAAUCCUAUCUGCAGCCCCAUCACAGCCGCCGCUAGAUUCCACAGCUGCAAGUGCGGA
AACUGCCCCGCCAAGUGUGACCAGUGCGAGAGAGAUUACGGCCCUCCU

[0212] Hence, preferably the RNA construct comprises a sequence substantially as set out in SEQ ID No: 106, or a fragment or variant thereof.

[0213] In one embodiment, the at least one IIP is Sendai Virus Protein V (strain Fushimi) (P69284), or an orthologue thereof. One embodiment of the polypeptide sequence of Sendai Virus Protein V (SeV V protein) is represented herein as SEQ ID No: 107, as follows:

[SEQ ID No: 107]
MDQDAFILKEDSEVEREAPGGRESLSDVIGFLDAVLSSEPTDIGGDRSWLHNTINTPQGPGSAHRAKSEGEGEVSTPS
TQDNRSGEESRVSGRTSKPEAEAHAGNLDKQNIHRAFGGRTGTNSVSQDLGDGGDSGILENPPNERGYPRSGIEDENR
EMAAHPDKRGEDQAEGLPEEVRGGTSLPDEGEGGASNNGRSMEPGSSHSARVTGVLVIPSPELEEAVLRRNKRRPTNS
GSKPLTPATVPGTRSPPLNRYNSTGSPPGKPPSTQDEHINSGDTPAVRVKDRKPPIGTRSVSDCPANGRPIHPGLETD
STKKGHRREHITYERDGYIVDESWCNPVCSRIRVIPRRELCVCKTCPKVCKLCRDDIQCMRPDPFCREIFRS

[0214] Therefore, preferably the RNA construct comprises a nucleotide sequence which encodes an amino acid sequence substantially as set out in SEQ ID No: 107, or a variant or fragment thereof.

[0215] In one embodiment, the SeV V polypeptide is encoded by the DNA nucleotide sequence of SEQ ID No: 108, as follows:

[SEQ ID No: 108]
ATGGATCAAGATGCCTTCATTCTTAAAGAAGATTCTGAAGTTGAGAGGGAGGCGCCAGGAGGAAGAGAGTCGCTCTCG
GATGTTATCGGATTCCTCGATGCTGTCCTGTCGAGTGAACCAACTGACATCGGAGGGGACAGAAGCTGGCTCCACAAC
ACCATCAACACTCCCCAAGGACCAGGCTCTGCCCATAGAGCCAAAAGTGAGGGCGAAGGAGAAGTCTCAACACCGTCG
ACCCAAGATAATCGATCAGGTGAGGAGAGTAGAGTCTCTGGGAGAACAAGCAAGCCAGAGGCAGAAGCACATGCTGGA
AACCTTGATAAACAAAATATACACCGGGCCTTTGGGGGAAGAACTGGTACAAACTCTGTATCTCAGGATCTGGGCGAT
GGAGGAGACTCCGGAATCCTTGAAAATCCCCCAAATGAGAGAGGATATCCGAGATCAGGTATTGAAGATGAAAACAGA
GAGATGGCTGCGCACCCTGATAAGAGGGGAGAAGACCAAGCTGAAGGACTTCCAGAAGAGGTACGAGGAGGTACATCC
CTACCTGATGAAGGAGAAGGTGGAGCAAGTAATAATGGAAGAAGCATGGAGCCTGGCAGCTCACATAGTGCAAGAGTA
ACTGGGGTCCTGGTGATTCCTAGCCCCGAACTCGAAGAGGCTGTGCTACGGAGGAACAAAAGAAGACCTACCAACAGT
GGGTCCAAACCTCTTACTCCAGCAACCGTGCCTGGCACCCGGTCCCCACCGCTGAATCGTTACAACAGCACAGGGTCA
CCACCAGGAAAACCCCCATCTACACAGGATGAGCACATCAACTCTGGGGACACCCCCGCCGTCAGGGTCAAAGACCGG
AAACCACCAATAGGGACCCGCTCTGTCTCAGATTGTCCAGCCAACGGCCGCCCAATCCACCCGGGTCTAGAGACCGAC
TCAACAAAAAAGGGgCATAGGAGAGAACACATCATCTATGAAAGAGATGGCTACATTGTTGACGAGTCTTGGTGTAAT
CCAGTCTGCTCAAGAATTCGAGTCATCCCGAGACGCGAGTTATGTGTTTGCAAGACGTGCCCTAAAGTCTGCAAACTA
TGCAGAGATGACATTCAATGTATGCGGCCTGATCCTTTCTGCCGAGAAATCTTCCGCTCG

[0216] Accordingly, preferably the SeV V polypeptide is encoded by the DNA nucleotide sequence substantially as set out in SEQ ID NO: 108, or a variant or fragment thereof.

[0217] One embodiment of codon optimised nucleic acid (DNA) encoding the SeV V polypeptide is provided herein as SEQ ID No: 109, as follows:

[SEQ ID No: 109]
ATGGACCAGGACGCCTTCATCCTGAAAGAGGACAGCGAGGTCGAGAGAGAAGCCCCTGGCGGAAGAGAAAGCCTGTCC
GATGTGATCGGCTTCCTGGATGCCGTGCTGAGCAGCGAGCCTACAGATATCGGCGGCGATAGAAGCTGGCTGCACAAC
ACCATCAACACCCCTCAAGGCCCTGGCTCTGCCCACAGAGCTAAGTCTGAAGGCGAGGGCGAAGTGTCTACCCCTAGC
ACACAGGACAACAGAAGCGGCGAGGAATCCAGAGTGTCCGGCAGAACAAGCAAGCCTGAGGCCGAAGCTCACGCCGGC
AATCTGGACAAGCAGAACATCCACAGAGCCTTCGGCGGCAGAACCGGCACAAATAGCGTGTCACAGGACCTCGGAGAT
GGCGGCGATTCTGGCATCCTGGAAAACCCTCCAAACGAGCGGGGCTACCCTAGAAGCGGAATCGAGGACGAGAACAGA
GAGATGGCCGCTCATCCCGACAAGAGAGGCGAAGATCAGGCCGAGGGACTGCCTGAAGAAGTGCGCGGAGGAACAAGC
CTGCCTGACGAAGGCGAAGGCGGAGCCTCTAACAACGGCAGATCTATGGAACCCGGCAGCAGCCATAGCGCCAGAGTT
ACAGGCGTGCTGGTCATCCCATCTCCAGAGCTGGAAGAGGCTGTGCTGAGGCGGAACAAGAGAAGGCCTACCAACAGC
GGCAGCAAGCCTCTGACACCAGCTACAGTGCCTGGCACAAGAAGCCCTCCACTGAACCGGTACAACAGCACAGGCTCT
CCACCTGGCAAGCCTCCATCCACACAGGATGAGCACATCAACTCCGGCGATACCCCTGCCGTCAGAGTGAAGGACAGA
AAGCCTCCTATCGGCACCAGAAGCGTGTCCGACTGTCCTGCCAATGGCAGACCTATTCACCCCGGCCTGGAAACCGAC
AGCACCAAGAAGGGACACAGACGGGAACACATCATCTACGAGCGCGACGGCTACATCGTGGACGAGAGCTGGTGCAAC
CCTGTGTGCAGCCGGATCAGAGTGATCCCTCGGAGAGAACTGTGCGTGTGCAAGACATGCCCCAAAGTGTGCAAGCTG
TGCCGGGACGACATCCAGTGTATGCGGCCCGATCCTTTCTGCAGAGAGATCTTCAGAAGC

[0218] Hence, preferably the RNA construct is encoded by a DNA sequence substantially as set out in SEQ ID No: 109, or a fragment or variant thereof.

[0219] In an embodiment, the RNA sequence corresponding to the codon optimised DNA sequence of SEQ ID No: 109 is provided herein as SEQ ID No: 110, as follows:

[SEQ ID No: 110]
AUGGACCAGGACGCCUUCAUCCUGAAAGAGGACAGCGAGGUCGAGAGAGAAGCCCCUGGCGGAAGAGAAAGCCUGUCC
GAUGUGAUCGGCUUCCUGGAUGCCGUGCUGAGCAGCGAGCCUACAGAUAUCGGCGGCGAUAGAAGCUGGCUGCACAAC
ACCAUCAACACCCCUCAAGGCCCUGGCUCUGCCCACAGAGCUAAGUCUGAAGGCGAGGGCGAAGUGUCUACCCCUAGC
ACACAGGACAACAGAAGCGGCGAGGAAUCCAGAGUGUCCGGCAGAACAAGCAAGCCUGAGGCCGAAGCUCACGCCGGC
AAUCUGGACAAGCAGAACAUCCACAGAGCCUUCGGCGGCAGAACCGGCACAAAUAGCGUGUCACAGGACCUCGGAGAU
GGCGGCGAUUCUGGCAUCCUGGAAAACCCUCCAAACGAGCGGGGCUACCCUAGAAGCGGAAUCGAGGACGAGAACAGA
GAGAUGGCCGCUCAUCCCGACAAGAGAGGCGAAGAUCAGGCCGAGGGACUGCCUGAAGAAGUGCGCGGAGGAACAAGC
CUGCCUGACGAAGGCGAAGGCGGAGCCUCUAACAACGGCAGAUCUAUGGAACCCGGCAGCAGCCAUAGCGCCAGAGUU
ACAGGCGUGCUGGUCAUCCCAUCUCCAGAGCUGGAAGAGGCUGUGCUGAGGCGGAACAAGAGAAGGCCUACCAACAGC
GGCAGCAAGCCUCUGACACCAGCUACAGUGCCUGGCACAAGAAGCCCUCCACUGAACCGGUACAACAGCACAGGCUCU
CCACCUGGCAAGCCUCCAUCCACACAGGAUGAGCACAUCAACUCCGGCGAUACCCCUGCCGUCAGAGUGAAGGACAGA
AAGCCUCCUAUCGGCACCAGAAGCGUGUCCGACUGUCCUGCCAAUGGCAGACCUAUUCACCCCGGCCUGGAAACCGAC
AGCACCAAGAAGGGACACAGACGGGAACACAUCAUCUACGAGCGCGACGGCUACAUCGUGGACGAGAGCUGGUGCAAC
CCUGUGUGCAGCCGGAUCAGAGUGAUCCCUCGGAGAGAACUGUGCGUGUGCAAGACAUGCCCCAAAGUGUGCAAGCUG
UGCCGGGACGACAUCCAGUGUAUGCGGCCCGAUCCUUUCUGCAGAGAGAUCUUCAGAAGC

[0220] Hence, preferably the RNA construct comprises a sequence substantially as set out in SEQ ID No: 110, or a fragment or variant thereof.

[0221] In one embodiment, the at least one IIP is Measles Non-structural protein V (strain Ichinose-B95a) (POC774), or an orthologue thereof. One embodiment of the polypeptide sequence of Measles V protein is represented herein as SEQ ID No: 111, as follows:

[SEQ ID No: 111]
MAEEQARHVKNGLECIRALKAEPIGSLAVEEAMAAWSEISDNPGQDRATCKEEEAGSSGLSKPCLSAIGSTEGGAPRI
RGQGSGESDDDAETLGIPSRNLQASSTGLQCYHVYDHSGEAVKGIQDADSIMVQSGLDGDSTLSGGDDESENSDVDIG
EPDTEGYAITDRGSAPISMGFRASDVETAEGGEIHELLKLQSRGNNFPKLGKTLNVPPPPNPSRASTSETPIKKGHRR
EIGLIWNGDRVFIDRWCNPMCSKVTLGTIRARCTCGECPRVCEQCRTDTGVDTRIWYHNLPEIPE

[0222] Therefore, preferably the RNA construct comprises a nucleotide sequence which encodes an amino acid sequence substantially as set out in SEQ ID No: 111, or a variant or fragment thereof.

[0223] In one embodiment, the Measles V polypeptide is encoded by the DNA nucleotide sequence of SEQ ID No: 112, as follows:

[SEQ ID No: 112]
ATGGCAGAAGAGCAGGCACGCCATGTCAAAAACGGACTGGAATGCATCCGGGCTCTCAAGGCCGAGCCCATCGGCTCA
CTGGCCGTCGAGGAAGCCATGGCAGCATGGTCAGAAATATCAGACAACCCAGGACAGGACCGAGCCACCTGCAAGGAA
GAGGAGGCAGGCAGTTCGGGTCTCAGCAAACCATGCCTCTCAGCAATTGGATCAACTGAAGGCGGTGCACCTCGCATC
CGCGGTCAGGGATCTGGAGAAAGCGATGACGACGCTGAAACTTTGGGAATCCCCTCAAGAAATCTCCAGGCATCAAGC
ACTGGGTTACAGTGTTATCATGTTTATGATCACAGCGGTGAAGCGGTTAAGGGAATCCAAGATGCTGACTCTATCATG
GTTCAATCAGGCCTTGATGGTGATAGCACCCTCTCAGGAGGAGACGATGAATCTGAAAACAGCGATGTGGATATTGGC
GAACCTGATACCGAGGGATATGCTATCACTGACCGGGGATCTGCTCCCATCTCTATGGGGTTCAGGGCTTCTGATGTT
GAAACTGCAGAAGGAGGGGAGATCCACGAGCTCCTGAAACTCCAATCCAGAGGCAACAACTTTCCGAAGCTTGGGAAA
ACTCTCAATGTTCCTCCGCCCCCGAACCCCAGTAGGGCCAGCACTTCCGAGACACCCATTAAAAAGGGgCACAGACGC
GAGATTGGCCTCATTTGGAACGGAGATCGCGTCTTTATTGACAGGTGGTGCAACCCAATGTGCTCGAAAGTCACCCTC
GGAACCATCAGGGCCAGGTGCACCTGCGGGGAATGTCCCCGAGIGTGTGAGCAATGCCGCACTGATACAGGAGTGGAC
ACCCGAATCTGGTACCACAATCTCCCCGAGATCCCAGAA

[0224] Accordingly, preferably the Measles V polypeptide is encoded by the DNA nucleotide sequence substantially as set out in SEQ ID NO: 112, or a variant or fragment thereof.

[0225] One embodiment of codon optimised nucleic acid (DNA) encoding the Measles V polypeptide is provided herein as SEQ ID No: 113, as follows:

[SEQ ID No: 113]
ATGGCCGAAGAACAGGCCAGACACGTGAAGAACGGCCTGGAATGCATCAGAGCCCTGAAGGCCGAGCCTATCGGATCT
CTGGCTGTGGAAGAAGCCATGGCCGCTTGGAGCGAGATCAGCGATAATCCCGGCCAGGACCGGGCCACCTGTAAAGAA
GAAGAGGCCGGATCTAGCGGCCTGAGCAAGCCTTGTCTGTCTGCCATCGGCTCTACAGAAGGCGGCGCTCCTAGAATC
AGAGGCCAAGGATCTGGCGAGAGCGACGACGATGCTGAGACACTGGGCATCCCCAGCAGAAATCTGCAGGCCAGCTCT
ACCGGCCTGCAGTGCTATCACGTGTACGATCACTCTGGCGAGGCCGTGAAGGGAATCCAGGATGCCGATAGCATCATG
GTGCAGAGCGGCCTGGATGGCGACTCTACACTTAGCGGCGGAGATGACGAGAGCGAGAACTCCGATGTGGACATCGGC
GAGCCTGATACAGAGGGCTACGCCATCACAGACAGAGGCAGCGCCCCTATCAGCATGGGCTTTAGAGCCAGCGACGTG
GAAACAGCCGAAGGCGGAGAGATTCACGAGCTGCTGAAGCTGCAGAGCCGGGGCAACAACTTTCCCAAGCTGGGCAAG
ACCCTGAACGTGCCACCTCCTCCAAATCCTAGCAGAGCCAGCACCAGCGAGACACCCATCAAGAAGGGCCACAGAAGA
GAGATCGGCCTGATCTGGAACGGCGACCGGGTGTTCATCGACAGATGGTGCAACCCCATGTGCAGCAAAGTGACCCTG
GGCACCATCCGGGCCAGATGTACATGCGGAGAGTGCCCTAGAGTGTGCGAGCAGTGCAGAACCGATACCGGCGTGGAC
ACCCGGATCTGGTATCACAACCTGCCTGAGATCCCCGAG

[0226] Hence, preferably the RNA construct is encoded by a DNA sequence substantially as set out in SEQ ID No: 113, or a fragment or variant thereof.

[0227] In an embodiment, the RNA sequence corresponding to the codon optimised DNA sequence of SEQ ID No: 113 is provided herein as SEQ ID No: 114, as follows:

[SEQ ID No: 114]
AUGGCCGAAGAACAGGCCAGACACGUGAAGAACGGCCUGGAAUGCAUCAGAGCCCUGAAGGCCGAGCCUAUCGGAUCU
CUGGCUGUGGAAGAAGCCAUGGCCGCUUGGAGCGAGAUCAGCGAUAAUCCCGGCCAGGACCGGGCCACCUGUAAAGAA
GAAGAGGCCGGAUCUAGCGGCCUGAGCAAGCCUUGUCUGUCUGCCAUCGGCUCUACAGAAGGCGGCGCUCCUAGAAUC
AGAGGCCAAGGAUCUGGCGAGAGCGACGACGAUGCUGAGACACUGGGCAUCCCCAGCAGAAAUCUGCAGGCCAGCUCU
ACCGGCCUGCAGUGCUAUCACGUGUACGAUCACUCUGGCGAGGCCGUGAAGGGAAUCCAGGAUGCCGAUAGCAUCAUG
GUGCAGAGCGGCCUGGAUGGCGACUCUACACUUAGCGGCGGAGAUGACGAGAGCGAGAACUCCGAUGUGGACAUCGGC
GAGCCUGAUACAGAGGGCUACGCCAUCACAGACAGAGGCAGCGCCCCUAUCAGCAUGGGCUUUAGAGCCAGCGACGUG
GAAACAGCCGAAGGCGGAGAGAUUCACGAGCUGCUGAAGCUGCAGAGCCGGGGCAACAACUUUCCCAAGCUGGGCAAG
ACCCUGAACGUGCCACCUCCUCCAAAUCCUAGCAGAGCCAGCACCAGCGAGACACCCAUCAAGAAGGGCCACAGAAGA
GAGAUCGGCCUGAUCUGGAACGGCGACCGGGUGUUCAUCGACAGAUGGUGCAACCCCAUGUGCAGCAAAGUGACCCUG
GGCACCAUCCGGGCCAGAUGUACAUGCGGAGAGUGCCCUAGAGUGUGCGAGCAGUGCAGAACCGAUACCGGCGUGGAC
ACCCGGAUCUGGUAUCACAACCUGCCUGAGAUCCCCGAG

[0228] Hence, preferably the RNA construct comprises a sequence substantially as set out in SEQ ID No: 114, or a fragment or variant thereof.

[0229] In one embodiment, the at least one IIP is Nipah virus Non-structural protein V (NiV V protein) (Q997F2; V_NIPAV), or an orthologue thereof. One embodiment of the polypeptide sequence of NiV V protein is represented herein as SEQ ID No: 115, as follows:

[SEQ ID No: 115]
MDKLELVNDGLNIIDFIQKNQKEIQKTYGRSSIQQPSIKDQTKAWEDFLQCTSGESEQVEGGMSKDDGDVERRNLEDL
SSTSPTDGTIGKRVSNTRDWAEGSDDIQLDPVVTDVVYHDHGGECTGYGFTSSPERGWSDYTSGANNGNVCLVSDAKM
LSYAPEIAVSKEDRETDLVHLENKLSTTGLNPTAVPFTLRNLSDPAKDSPVIAEHYYGLGVKEQNVGPQTSRNVNLDS
IKLYTSDDEEADQLEFEDEFAGSSSEVIVGISPEDEEPSSVGGKPNESIGRTIEGQSIRDNLQAKDNKSTDVPGAGPK
DSAVKEEPPQKRLPMLAEEFECSGSEDPIIRELLKENSLINCQQGKDAQPPYHWSIERSISPDKTEIVNGAVQTADRQ
RPGTPMPKSRGIPIKKGHRREISICWDGKRAWVEEWCNPACSRITPLPRRQECQCGECPTECFHCG

[0230] Therefore, preferably the RNA construct comprises a nucleotide sequence which encodes an amino acid sequence substantially as set out in SEQ ID No: 115, or a variant or fragment thereof.

[0231] In one embodiment, the NiV V polypeptide is encoded by the DNA nucleotide sequence of SEQ ID No: 116, as follows:

[SEQ ID No: 116]
ATGGATAAATTGGAACTAGTCAATGATGGCCTCAATATTATTGACTTTATTCAGAAGAACCAAAAAGAAATACAGAAG
ACATACGGACGATCAAGTATTCAACAACCCAGCATCAAAGATCAAACAAAAGCCTGGGAAGATTTTCTGCAGTGCACC
AGTGGAGAATCTGAACAAGTTGAGGGGGGAATGTCTAAGGATGATGGAGATGTTGAAAGAAGAAACTTGGAGGATCTA
TCCAGTACTTCTCCCACAGATGGAACTATTGGAAAGAGAGTGTCGAACACCCGTGACTGGGCAGAAGGTTCAGATGAC
ATACAACTGGACCCAGTGGTTACAGACGTTGTATACCATGATCATGGAGGAGAATGTACCGGATATGGATTTACTTCA
AGCCCTGAGAGAGGGTGGAGTGATTACACATCAGGAGCAAACAATGGGAATGTATGTCTTGTATCTGATGCAAAGATG
CTGTCCTATGCTCCCGAAATTGCAGTTTCTAAAGAAGATCGGGAAACTGATCTAGTTCATCTTGAGAATAAACTATCT
ACTACAGGACTGAATCCCACAGCAGTACCGTTCACTCTGAGAAACCTGTCTGATCCTGCAAAAGACTCTCCTGTGATT
GCTGAACACTACTACGGACTAGGAGTTAAAGAGCAAAACGTTGGCCCTCAGACTAGCAGAAATGTCAATTTGGACAGC
ATCAAATTGTACACATCAGATGACGAAGAGGCAGATCAGCTTGAATTCGAAGATGAGTTTGCAGGAAGCTCAAGTGAA
GTGATAGTCGGCATTTCTCCTGAAGATGAAGAGCCTTCAAGTGTTGGCGGAAAACCCAATGAATCCATTGGACGTACA
ATCGAAGGCCAATCAATCCGAGACAACCTTCAAGCCAAGGACAACAAATCAACAGATGTACCAGGAGCAGGACCGAAA
GATTCAGCAGTGAAGGAAGAACCACCCCAGAAGAGGCTACCTATGTTAGCTGAAGAATTTGAGTGCTCTGGATCGGAA
GACCCAATCATTCGGGAGCTGCTGAAGGAGAACTCACTCATAAATTGTCAGCAAGGGAAAGATGCTCAGCCTCCATAT
CATTGGAGCATCGAGAGGTCAATAAGCCCGGATAAAACTGAGATCGTCAACGGTGCTGTGCAAACTGCTGACAGGCAA
AGACCAGGAACTCCGATGCCAAAGTCCCGAGGTATTCCCATTAAAAAGGGGCACAGACGCGAAATATCCATCTGCTGG
GACGGAAAACGTGCCTGGGTCGAAGAGTGGTGCAACCCGGCATGTTCGAGGATCACCCCCCTACCAAGAAGGCAAGAG
TGTCAATGCGGAGAATGTCCAACTGAATGCTTCCACTGCGGT

[0232] Accordingly, preferably the NiV V polypeptide is encoded by the DNA nucleotide sequence substantially as set out in SEQ ID NO: 116, or a variant or fragment thereof.

[0233] One embodiment of codon optimised nucleic acid (DNA) encoding the NiV V polypeptide is provided herein as SEQ ID No: 117, as follows:

[SEQ ID No: 117]
ATGGACAAGCTGGAACTGGTCAACGACGGCCTGAACATCATCGACTTCATCCAGAAGAACCAGAAAGAGATCCAGAAA
ACCTACGGCCGGTCCAGCATCCAGCAGCCTAGCATCAAGGATCAGACCAAGGCCTGGGAAGATTTCCTGCAGTGTACC
AGCGGCGAGAGCGAACAGGTTGAAGGCGGCATGAGCAAGGACGACGGCGACGTGGAAAGACGGAACCTGGAAGATCTG
AGCAGCACAAGCCCTACCGATGGCACCATCGGCAAGCGGGTGTCCAACACAAGAGATTGGGCCGAGGGCAGCGACGAC
ATTCAGCTGGATCCTGTGGTCACCGATGTGGTGTACCACGATCACGGCGGCGAGTGTACAGGCTACGGCTTTACAAGC
AGCCCCGAGAGAGGCTGGAGCGATTATACAAGCGGCGCCAACAACGGCAACGTGTGCCTGGTGTCTGACGCCAAGATG
CTGAGCTACGCCCCTGAGATCGCCGTGTCCAAAGAGGACAGAGAAACCGACCTGGTGCACCTGGAAAACAAGCTGAGC
ACCACCGGACTGAACCCTACCGCCGTGCCTTTCACACTGAGAAACCTGAGCGACCCCGCCAAGGACTCTCCTGTGATT
GCCGAGCACTACTACGGCCTGGGCGTGAAAGAACAGAACGTGGGCCCTCAGACCAGCCGGAACGTGAACCTGGATTCC
ATCAAGCTGTACACCTCCGACGACGAGGAAGCCGACCAGCTGGAATTCGAGGATGAGTTTGCCGGCAGCAGCAGCGAA
GTGATTGTGGGCATCAGCCCTGAGGACGAGGAACCTAGCTCTGTTGGCGGCAAGCCCAATGAGAGCATCGGCAGAACA
ATCGAGGGCCAGAGCATCCGGGATAACCTGCAGGCCAAGGACAACAAGAGCACCGATGTTCCAGGCGCTGGCCCTAAG
GATAGCGCCGTGAAAGAGGAACCACCTCAGAAACGGCTGCCCATGCTGGCCGAGGAATTTGAGTGTAGCGGCAGCGAG
GACCCCATCATCAGAGAGCTGCTGAAAGAGAACAGCCTGATCAACTGCCAGCAGGGCAAAGACGCCCAGCCTCCTTAC
CACTGGTCCATCGAGAGATCTATCAGCCCCGACAAGACCGAGATCGTGAATGGCGCTGTGCAGACCGCCGATAGACAG
AGGCCTGGAACTCCCATGCCTAAGAGCAGAGGCATCCCCATCAAGAAGGGCCACAGAAGAGAGATCAGCATCTGCTGG
GACGGCAAGCGCGCCTGGGTTGAAGAGTGGTGTAATCCCGCCTGCAGCCGGATCACACCTCTGCCTAGAAGGCAAGAG
TGCCAGTGTGGCGAGTGTCCCACCGAGTGTTTTCACTGTGGA

[0234] Hence, preferably the RNA construct is encoded by a DNA sequence substantially as set out in SEQ ID No: 117, or a fragment or variant thereof.

[0235] In an embodiment, the RNA sequence corresponding to the codon optimised DNA sequence of SEQ ID No: 117 is provided herein as SEQ ID No: 118, as follows:

[SEQ ID No: 118]
AUGGACAAGCUGGAACUGGUCAACGACGGCCUGAACAUCAUCGACUUCAUCCAGAAGAACCAGAAAGAGAUCCAGAAA
ACCUACGGCCGGUCCAGCAUCCAGCAGCCUAGCAUCAAGGAUCAGACCAAGGCCUGGGAAGAUUUCCUGCAGUGUACC
AGCGGCGAGAGCGAACAGGUUGAAGGCGGCAUGAGCAAGGACGACGGCGACGUGGAAAGACGGAACCUGGAAGAUCUG
AGCAGCACAAGCCCUACCGAUGGCACCAUCGGCAAGCGGGUGUCCAACACAAGAGAUUGGGCCGAGGGCAGCGACGAC
AUUCAGCUGGAUCCUGUGGUCACCGAUGUGGUGUACCACGAUCACGGCGGCGAGUGUACAGGCUACGGCUUUACAAGC
AGCCCCGAGAGAGGCUGGAGCGAUUAUACAAGCGGCGCCAACAACGGCAACGUGUGCCUGGUGUCUGACGCCAAGAUG
CUGAGCUACGCCCCUGAGAUCGCCGUGUCCAAAGAGGACAGAGAAACCGACCUGGUGCACCUGGAAAACAAGCUGAGC
ACCACCGGACUGAACCCUACCGCCGUGCCUUUCACACUGAGAAACCUGAGCGACCCCGCCAAGGACUCUCCUGUGAUU
GCCGAGCACUACUACGGCCUGGGCGUGAAAGAACAGAACGUGGGCCCUCAGACCAGCCGGAACGUGAACCUGGAUUCC
AUCAAGCUGUACACCUCCGACGACGAGGAAGCCGACCAGCUGGAAUUCGAGGAUGAGUUUGCCGGCAGCAGCAGCGAA
GUGAUUGUGGGCAUCAGCCCUGAGGACGAGGAACCUAGCUCUGUUGGCGGCAAGCCCAAUGAGAGCAUCGGCAGAACA
AUCGAGGGCCAGAGCAUCCGGGAUAACCUGCAGGCCAAGGACAACAAGAGCACCGAUGUUCCAGGCGCUGGCCCUAAG
GAUAGCGCCGUGAAAGAGGAACCACCUCAGAAACGGCUGCCCAUGCUGGCCGAGGAAUUUGAGUGUAGCGGCAGCGAG
GACCCCAUCAUCAGAGAGCUGCUGAAAGAGAACAGCCUGAUCAACUGCCAGCAGGGCAAAGACGCCCAGCCUCCUUAC
CACUGGUCCAUCGAGAGAUCUAUCAGCCCCGACAAGACCGAGAUCGUGAAUGGCGCUGUGCAGACCGCCGAUAGACAG
AGGCCUGGAACUCCCAUGCCUAAGAGCAGAGGCAUCCCCAUCAAGAAGGGCCACAGAAGAGAGAUCAGCAUCUGCUGG
GACGGCAAGCGCGCCUGGGUUGAAGAGUGGUGUAAUCCCGCCUGCAGCCGGAUCACACCUCUGCCUAGAAGGCAAGAG
UGCCAGUGUGGCGAGUGUCCCACCGAGUGUUUUCACUGUGGA

[0236] Hence, preferably the RNA construct comprises a sequence substantially as set out in SEQ ID No: 118, or a fragment or variant thereof.

[0237] In one embodiment, the at least one IIP is POLG_EMCV (Encephalomyocarditis virus 2C) genome polyprotein (Li L, Fan H, Song Z, Liu X, Bai J, Jiang P (2019) Encephalomyocarditis virus 2C protein antagonizes interferon-B signaling pathway through interaction with MDA5 Antiviral Res, 161, 70-84), or an orthologue thereof. One embodiment of the polypeptide sequence of EMCV is represented herein as SEQ ID No: 119, as follows:

[SEQ ID No: 119]
LKARDINDIFAILKNGEWLVKLILAIRDWIKAWIASEEKFVTMTDLVPGILEKQRDLNDPSKYKEAKEWLDNARQACL
KSGNVHIANLCKVVAPAPSKSRPEPVVVCLRGKSGQGKSFLANVLAQAISTHFTGRIDSVWYCPPDPDHFDGYNQQTV
VVMDDLGQNPDGKDFKYFAQMVSTTGFIPPMASLEDKGKPFNSKVIIATTNLYSGFTPRTMVCPDALNRRFHFDIDVS
AKDGYKINSKLDIIKALEDTHANPVAMFQYDCALLNGMAVEMKRMQQDMFKPQPPLQNVYQLVQEVIDRVELHEKVSS
HPIFKQ

[0238] Therefore, preferably the RNA construct comprises a nucleotide sequence which encodes an amino acid sequence substantially as set out in SEQ ID No: 119, or a variant or fragment thereof.

[0239] In one embodiment, the EMCV polypeptide is encoded by the DNA nucleotide sequence of SEQ ID No: 120, as follows:

[SEQ ID No: 120]
CTCAAAGCACGTGACATCAACGACATCTTCGCCATTCTCAAGAACGGCGAGTGGCTGGTCAAACTGATCCTTGCCATC
CGCGACTGGATTAAGGCTTGGATCGCCTCAGAAGAGAAGTTTGTCACCATGACAGACTTGGTGCCTGGCATCCTTGAA
AAGCAGCGGGACCTGAACGACCCGAGCAAGTACAAGGAAGCCAAGGAGTGGCTCGACAACGCGCGCCAAGCGTGTTTG
AAGAGCGGGAACGTCCACATTGCCAACCTGTGCAAAGTGGTCGCACCAGCACCCAGCAAGTCGAGGCCCGAACCCGTG
GTTGTTTGCCTCCGCGGCAAATCTGGCCAGGGCAAGAGCTTCCTTGCAAACGTGCTTGCACAGGCAATTTCCACCCAC
TTCACCGGCAGAATCGACTCAGTGTGGTACTGCCCACCTGACCCTGACCACTTCGACGGTTACAACCAGCAAACCGTT
GTTGTGATGGATGATTTGGGCCAGAACCCTGACGGCAAGGACTTCAAATACTTTGCCCAAATGGTCTCGACCACAGGG
TTTATCCCGCCCATGGCATCACTCGAGGACAAAGGTAAACCTTTCAACAGCAAAGTCATCATCGCGACCACCAACTTG
TACTCGGGCTTCACCCCGAGGACCATGGTATGTCCCGACGCACTGAACCGGAGGTTTCACTTTGACATCGATGTGAGT
GCTAAGGATGGGTACAAAATTAACAGCAAATTGGACATTATCAAAGCACTCGAAGACACCCACGCCAACCCAGTGGCA
ATGTTTCAATACGACTGIGCCCTTCTCAACGGCATGGCCGTTGAAATGAAGAGAATGCAACAAGACATGTTCAAGCCT
CAACCACCCCTCCAGAATGTGTACCAGCTTGTTCAGGAGGTGATCGATCGGGTCGAGCTCCACGAGAAAGTGTCGAGT
CACCCGATCTTCAAGCAG

[0240] Accordingly, preferably the EMCV polypeptide is encoded by the DNA nucleotide sequence substantially as set out in SEQ ID NO: 120, or a variant or fragment thereof.

[0241] One embodiment of codon optimised nucleic acid (DNA) encoding the EMCV polypeptide is provided herein as SEQ ID No: 121, as follows:

[SEQ ID No: 121]
CTGAAGGCCAGAGACATCAACGACATCTTCGCCATCCTGAAGAACGGCGAGTGGCTGGTCAAGCTGATCCTGGCCATC
AGAGACTGGATCAAGGCCTGGATCGCCAGCGAAGAGAAGTTCGTGACCATGACCGATCTGGTGCCCGGCATCCTGGAA
AAGCAGAGGGACCTGAACGACCCCAGCAAGTACAAAGAGGCCAAAGAATGGCTGGACAACGCCAGACAGGCCTGCCTG
AAGTCCGGCAATGTGCATATCGCCAACCTGTGCAAGGTGGTGGCCCCTGCTCCTAGCAAGTCTAGACCTGAGCCTGTG
GTCGTGTGCCTGAGAGGCAAATCTGGCCAGGGCAAGAGCTTCCTGGCCAATGTTCTGGCCCAGGCCATCAGCACCCAC
TTCACCGGAAGAATCGACAGCGTGTGGTACTGCCCTCCTGATCCTGACCACTTCGACGGCTACAACCAGCAGACCGTG
GTGGTCATGGACGACCTGGGACAGAACCCCGACGGCAAGGACTTCAAGTACTTCGCCCAGATGGTGTCCACCACCGGC
TTCATTCCTCCAATGGCCAGCCTGGAAGATAAGGGCAAGCCCTTCAACAGCAAAGTGATCATTGCCACCACCAACCTG
TACAGCGGCTTCACCCCTAGAACCATGGTCTGCCCCGACGCTCTGAACAGACGGTTCCACTTTGACATCGACGTGTCC
GCCAAGGATGGCTACAAGATCAACTCCAAGCTGGACATCATCAAGGCCCTCGAGGACACCCACGCCAATCCTGTGGCC
ATGTTCCAGTACGATTGCGCCCTGCTGAATGGCATGGCCGTGGAAATGAAGCGGATGCAGCAGGACATGTTCAAGCCC
CAGCCTCCACTGCAGAACGTGTACCAGCTCGTGCAAGAAGTGATCGACCGGGTCGAGCTGCACGAGAAGGTGTCCTCT
CATCCCATCTTCAAGCAG

[0242] Hence, preferably the RNA construct is encoded by a DNA sequence substantially as set out in SEQ ID No: 121, or a fragment or variant thereof.

[0243] In an embodiment, the RNA sequence corresponding to the codon optimised DNA sequence of SEQ ID No: 121 is provided herein as SEQ ID No: 122, as follows:

[SEQ ID No: 122]
CUGAAGGCCAGAGACAUCAACGACAUCUUCGCCAUCCUGAAGAACGGCGAGUGGCUGGUCAAGCUGAUCCUGGCCAUC
AGAGACUGGAUCAAGGCCUGGAUCGCCAGCGAAGAGAAGUUCGUGACCAUGACCGAUCUGGUGCCCGGCAUCCUGGAA
AAGCAGAGGGACCUGAACGACCCCAGCAAGUACAAAGAGGCCAAAGAAUGGCUGGACAACGCCAGACAGGCCUGCCUG
AAGUCCGGCAAUGUGCAUAUCGCCAACCUGUGCAAGGUGGUGGCCCCUGCUCCUAGCAAGUCUAGACCUGAGCCUGUG
GUCGUGUGCCUGAGAGGCAAAUCUGGCCAGGGCAAGAGCUUCCUGGCCAAUGUUCUGGCCCAGGCCAUCAGCACCCAC
UUCACCGGAAGAAUCGACAGCGUGUGGUACUGCCCUCCUGAUCCUGACCACUUCGACGGCUACAACCAGCAGACCGUG
GUGGUCAUGGACGACCUGGGACAGAACCCCGACGGCAAGGACUUCAAGUACUUCGCCCAGAUGGUGUCCACCACCGGC
UUCAUUCCUCCAAUGGCCAGCCUGGAAGAUAAGGGCAAGCCCUUCAACAGCAAAGUGAUCAUUGCCACCACCAACCUG
UACAGCGGCUUCACCCCUAGAACCAUGGUCUGCCCCGACGCUCUGAACAGACGGUUCCACUUUGACAUCGACGUGUCC
GCCAAGGAUGGCUACAAGAUCAACUCCAAGCUGGACAUCAUCAAGGCCCUCGAGGACACCCACGCCAAUCCUGUGGCC
AUGUUCCAGUACGAUUGCGCCCUGCUGAAUGGCAUGGCCGUGGAAAUGAAGCGGAUGCAGCAGGACAUGUUCAAGCCC
CAGCCUCCACUGCAGAACGUGUACCAGCUCGUGCAAGAAGUGAUCGACCGGGUCGAGCUGCACGAGAAGGUGUCCUCU
CAUCCCAUCUUCAAGCAG

[0244] Hence, preferably the RNA construct comprises a sequence substantially as set out in SEQ ID No: 122, or a fragment or variant thereof.

[0245] In one embodiment, the at least one IIP is Birnavirus VP3 (Avian infectious bursal disease virus (IBDV) (Gumboro disease virus) Capsid Protein VP3), or an orthologue thereof (Ye C, Jia L, Sun Y, Hu B, Wang L, Xingmeng L, Zu J (2014) Inhibition of antiviral innate immunity by birnavirus VP3 protein via blockage of viral double-stranded RNA binding to the host cytoplasmic RNA detector MDA5. J Virol. 88, 18, 11154-11156). One embodiment of the polypeptide sequence of Birnavirus VP3 is represented herein as SEQ ID No: 123, as follows:

[SEQ ID No: 123]
ASEFKETPELESAVRAMEAAANVDPLFQSALSVFMWLEENGIVTDMANFALDSPNAHRMRNFLANAPQAGS
KSQRAKYGTAGYGVEARGPTPEEAQREKDTRISKKMETMGIYFATPEWVALNGHRGPSPGQLKYWQNTREIPDPNEDY
LDYVHAEKSRLASEEQILRAATSIYGAPGQAEPPQAFIDEVAKVYEINHGRGPNQEQMKDLLLTAMEMKHRNPRRALP
KPKPKPNAPTQRPPGRLGRWIRTVSDEDLE

[0246] Therefore, preferably the RNA construct comprises a nucleotide sequence which encodes an amino acid sequence substantially as set out in SEQ ID No: 123, or a variant or fragment thereof.

[0247] In one embodiment, the Birnavirus VP3 polypeptide is encoded by the DNA nucleotide sequence of SEQ ID No: 124, as follows:

[SEQ ID No: 124]
GCATCAGAGTTCAAAGAGACCCCCGAACTCGAGAGTGCCGTCAGAGCAATGGAAGCAGCAGCCAACGTGGACCCACTA
TTCCAATCTGCACTCAGTGTGTTCATGTGGCTGGAAGAGAATGGGATTGTGACTGACATGGCCAACTTCGCACTCAGC
GACCCGAACGCCCATCGGATGCGAAATTTTCTTGCAAACGCACCACAAGCAGGCAGCAAGTCGCAAAGGGCCAAGTAC
GGGACAGCAGGCTACGGAGTGGAGGCTCGGGGCCCCACACCAGAGGAAGCACAGAGGGAAAAAGACACACGGATCTCA
AAGAAGATGGAGACCATGGGCATCTACTTTGCAACACCAGAATGGGTAGCACTCAATGGGCACCGAGGGCCAAGCCCC
GGCCAGCTAAAGTACTGGCAGAACACACGAGAAATACCGGACCCAAACGAGGACTATCTAGACTACGTGCATGCAGAG
AAGAGCCGGTTGGCATCAGAAGAACAAATCCTAAGGGCAGCTACGTCGATCTACGGGGCTCCAGGACAGGCAGAGCCA
CCCCAAGCTTTCATAGACGAAGTTGCCAAAGTCTATGAAATCAACCATGGACGTGGCCCAAACCAAGAACAGATGAAA
GATCTGCTCTTGACTGCGATGGAGATGAAGCATCGCAATCCCAGGCGGGCTCTACCAAAGCCCAAGCCAAAACCCAAT
GCTCCAACACAGAGACCCCCTGGTCGGCTGGGCCGCTGGATCAGGACCGTCTCTGATGAGGACCTTGAG

[0248] Accordingly, preferably the Birnavirus VP3 polypeptide is encoded by the DNA nucleotide sequence substantially as set out in SEQ ID NO: 124, or a variant or fragment thereof.

[0249] One embodiment of codon optimised nucleic acid (DNA) encoding the Birnavirus VP3 polypeptide is provided herein as SEQ ID No: 125, as follows:

[SEQ ID No: 125]
GCCAGCGAGTTCAAAGAGACACCCGAGCTGGAAAGCGCCGTCAGAGCTATGGAAGCCGCCGCTAATGTGGACCCTCTG
TTTCAGTCTGCCCTGAGCGTGTTCATGTGGCTGGAAGAGAACGGCATCGTGACCGACATGGCCAACTTCGCCCTGTCT
GACCCCAACGCTCACCGGATGAGAAACTTTCTGGCCAACGCTCCTCAGGCCGGCAGCAAGTCTCAGAGAGCCAAATAC
GGCACAGCCGGCTACGGCGTGGAAGCCAGAGGACCTACACCTGAGGAAGCCCAGAGAGAGAAGGACACCCGGATCAGC
AAGAAAATGGAAACCATGGGCATCTACTTCGCCACACCTGAGTGGGTCGCCCTGAATGGACACAGAGGACCATCTCCA
GGCCAGCTGAAGTACTGGCAGAACACCAGAGAGATCCCCGATCCTAACGAGGACTACCTGGACTACGTGCACGCCGAG
AAAAGCAGACTGGCCAGCGAGGAACAGATCCTGAGAGCCGCCACATCCATCTATGGCGCTCCAGGACAAGCCGAACCT
CCACAGGCCTTTATCGACGAGGTGGCCAAGGTGTACGAGATCAACCACGGCAGAGGCCCCAATCAAGAGCAGATGAAG
GACCTGCTGCTGACCGCCATGGAAATGAAGCACAGAAACCCCAGACGGGCCCTGCCTAAGCCAAAGCCTAAACCTAAC
GCTCCCACACAGCGGCCTCCAGGCAGACTCGGAAGATGGATCAGAACCGTGTCCGACGAGGACCTGGAA

[0250] Hence, preferably the RNA construct is encoded by a DNA sequence substantially as set out in SEQ ID No: 125, or a fragment or variant thereof.

[0251] In an embodiment, the RNA sequence corresponding to the codon optimised DNA sequence of SEQ ID No: 125 is provided herein as SEQ ID No: 126, as follows:

[SEQ ID No: 126]
GCCAGCGAGUUCAAAGAGACACCCGAGCUGGAAAGCGCCGUCAGAGCUAUGGAAGCCGCCGCUAAUGUGGACCCUCUG
UUUCAGUCUGCCCUGAGCGUGUUCAUGUGGCUGGAAGAGAACGGCAUCGUGACCGACAUGGCCAACUUCGCCCUGUCU
GACCCCAACGCUCACCGGAUGAGAAACUUUCUGGCCAACGCUCCUCAGGCCGGCAGCAAGUCUCAGAGAGCCAAAUAC
GGCACAGCCGGCUACGGCGUGGAAGCCAGAGGACCUACACCUGAGGAAGCCCAGAGAGAGAAGGACACCCGGAUCAGC
AAGAAAAUGGAAACCAUGGGCAUCUACUUCGCCACACCUGAGUGGGUCGCCCUGAAUGGACACAGAGGACCAUCUCCA
GGCCAGCUGAAGUACUGGCAGAACACCAGAGAGAUCCCCGAUCCUAACGAGGACUACCUGGACUACGUGCACGCCGAG
AAAAGCAGACUGGCCAGCGAGGAACAGAUCCUGAGAGCCGCCACAUCCAUCUAUGGCGCUCCAGGACAAGCCGAACCU
CCACAGGCCUUUAUCGACGAGGUGGCCAAGGUGUACGAGAUCAACCACGGCAGAGGCCCCAAUCAAGAGCAGAUGAAG
GACCUGCUGCUGACCGCCAUGGAAAUGAAGCACAGAAACCCCAGACGGGCCCUGCCUAAGCCAAAGCCUAAACCUAAC
GCUCCCACACAGCGGCCUCCAGGCAGACUCGGAAGAUGGAUCAGAACCGUGUCCGACGAGGACCUGGAA

[0252] Hence, preferably the RNA construct comprises a sequence substantially as set out in SEQ ID No: 126, or a fragment or variant thereof.

[0253] In one embodiment, the at least one IIP is Porcine delta coronavirus NS6 protein (A0A0K2D1N4), or an orthologue thereof. Fang P, Fang L, Ren J, Hong Y, Liu X, Zhao Y, Wang D, Peng G, Xiai S (2018) Porcine deltacoronavirus accessory protein NS6 antagonises interferon beta production by interfering with the binding of RIG-I/MDA-5 to double stranded RNA. J Virol., 92, 15, e00712-18. One embodiment of the polypeptide sequence of Porcine delta coronavirus NS6 is represented herein as SEQ ID No: 127, as follows:

[SEQ ID No: 127]
MCNCHLQLRDLYRLCNKLHIRRDDVPELIDPLVKTRCFAYSLVVLANAPIAFSILPRKILINGEPLLLEYGSIYGKD
FIIRPSLQVILEDELN

[0254] Therefore, preferably the RNA construct comprises a nucleotide sequence which encodes an amino acid sequence substantially as set out in SEQ ID No: 127, or a variant or fragment thereof.

[0255] In one embodiment, the Porcine delta coronavirus NS6 polypeptide is encoded by the DNA nucleotide sequence of SEQ ID No: 128, as follows:

[SEQ ID No: 128]
ATGTGCAACTGCCATCTGCAGCTGCGAGATTTATATAGATTGTGCAATAAGCTGCACATCAGAAGAGACGATGTTCCT
GAGCTTATTGACCCTCTCGTTAAAACTCGCTGTTTTGCTTACAGTCTCGTGGTTCTTGCTAATGCTAATCCAATTGCA
TTTAGCATACTACCTCGGAAAATTCTTATCAATGGTGAGCCTTTACTGCTTGAATATGGTAGCATATATGGTAAAGAC
TTTATCATTAGACCATCGCTCCAAGTCATTCTTGAAGATGAATTAAAT

[0256] Accordingly, preferably the Porcine delta coronavirus NS6 polypeptide is encoded by the DNA nucleotide sequence substantially as set out in SEQ ID NO: 128, or a variant or fragment thereof.

[0257] One embodiment of codon optimised nucleic acid (DNA) encoding the Porcine delta coronavirus NS6 polypeptide is provided herein as SEQ ID No: 129, as follows:

[SEQ ID No: 129]
ATGTGCAACTGCCATCTGCAGCTGCGGGACCTGTACCGGCTGTGTAACAAGCTGCACATCAGACGGGACGACGTGCCC
GAGCTGATCGATCCTCTGGTCAAGACCAGATGCTTCGCCTACAGCCTGGTGGTGCTGGCCAACGCCAATCCTATCGCC
TTCAGCATCCTGCCTCGGAAGATCCTGATCAACGGCGAGCCTCTGCTGCTGGAATACGGCAGCATCTACGGCAAGGAC
TTCATCATCAGACCCAGCCTGCAAGTGATCCTGGAAGATGAGCTGAACTGA

[0258] Hence, preferably the RNA construct is encoded by a DNA sequence substantially as set out in SEQ ID No: 129, or a fragment or variant thereof.

[0259] In an embodiment, the RNA sequence corresponding to the codon optimised DNA sequence of SEQ ID No: 129 is provided herein as SEQ ID No: 130, as follows:

[SEQ ID No: 130]
AUGUGCAACUGCCAUCUGCAGCUGCGGGACCUGUACCGGCUGUGUAACAAGCUGCACAUCAGACGGGACGACGUGCCC
GAGCUGAUCGAUCCUCUGGUCAAGACCAGAUGCUUCGCCUACAGCCUGGUGGUGCUGGCCAACGCCAAUCCUAUCGCC
UUCAGCAUCCUGCCUCGGAAGAUCCUGAUCAACGGCGAGCCUCUGCUGCUGGAAUACGGCAGCAUCUACGGCAAGGAC
UUCAUCAUCAGACCCAGCCUGCAAGUGAUCCUGGAAGAUGAGCUGAACUGA

[0260] Hence, preferably the RNA construct comprises a sequence substantially as set out in SEQ ID No: 130, or a fragment or variant thereof.

[0261] In one embodiment, the at least one IIP is LASV Z protein (073557|RING finger protein Z Lassa virus (strain Mouse/Sierra Leone/Josiah/1976), or an orthologue thereof (Xing J, Ly H, Liang Y J (2015) The Z proteins of pathogenic but not nonpathogenic arenaviruses inhibit RIG-I-like receptor-dependent interferon production. J Virol., 89, 5, 2944-2955. One embodiment of the polypeptide sequence of LASV Z is represented herein as SEQ ID No: 131, as follows:

[SEQ ID No: 131]
MGNKQAKAPESKDSPRASLIPDATHLGPQFCKSCWFENKGLVECNNHYLCLNCLTLLLSVSNRCPICKMPLPTKLRPS
AAPTAPPTGAADSIRPPPYSP

[0262] Therefore, preferably the RNA construct comprises a nucleotide sequence which encodes an amino acid sequence substantially as set out in SEQ ID No: 131, or a variant or fragment thereof.

[0263] In one embodiment, the LASV Z polypeptide is encoded by the DNA nucleotide sequence of SEQ ID No: 132, as follows:

[SEQ ID No: 132]
ATGGGAAACAAGCAAGCCAAAGCCCCAGAATCAAAAGACAGTCCGAGAGCCAGCCTGATCCCAGATGCCACACATCTA
GGGCCACAGTTCTGTAAGAGCTGCTGGTTCGAAAACAAGGGCCTGGTTGAGTGCAACAACCACTATCTGTGTCTCAAC
TGCCTCACCTTACTTCTAAGTGTCAGCAACAGGTGTCCCATTTGCAAGATGCCTCTCCCCACAAAACTGAGACCATCA
GCCGCTCCAACAGCACCTCCAACCGGAGCAGCGGACAGCATCAGACCCCCACCCTACAGTCCC

[0264] Accordingly, preferably the LASV Z polypeptide is encoded by the DNA nucleotide sequence substantially as set out in SEQ ID NO: 132, or a variant or fragment thereof.

[0265] One embodiment of codon optimised nucleic acid (DNA) encoding the LASV Z polypeptide is provided herein as SEQ ID No: 133, as follows:

[SEQ ID No: 133]
ATGGGCAACAAGCAGGCCAAGGCTCCCGAGAGCAAGGATAGCCCTAGAGCCTCTCTGATCCCCGACGCCACACATCTG
GGACCCCAGTTCTGCAAGAGCTGTTGGTTCGAGAACAAAGGCCTGGTGGAATGCAACAACCACTACCTGTGCCTGAAC
TGTCTGACCCTGCTGCTGAGCGTGTCCAACAGATGCCCCATCTGCAAGATGCCCCTGCCTACCAAGCTGAGGCCTTCT
GCTGCTCCTACAGCTCCTCCAACAGGCGCCGCTGATAGCATCAGACCTCCACCTTATAGCCCC

[0266] Hence, preferably the RNA construct is encoded by a DNA sequence substantially as set out in SEQ ID No: 133, or a fragment or variant thereof.

[0267] In an embodiment, the RNA sequence corresponding to the codon optimised DNA sequence of SEQ ID No: 133 is provided herein as SEQ ID No: 134, as follows:

[SEQ ID No: 134]
AUGGGCAACAAGCAGGCCAAGGCUCCCGAGAGCAAGGAUAGCCCUAGAGCCUCUCUGAUCCCCGACGCCACACAUCUG
GGACCCCAGUUCUGCAAGAGCUGUUGGUUCGAGAACAAAGGCCUGGUGGAAUGCAACAACCACUACCUGUGCCUGAAC
UGUCUGACCCUGCUGCUGAGCGUGUCCAACAGAUGCCCCAUCUGCAAGAUGCCCCUGCCUACCAAGCUGAGGCCUUCU
GCUGCUCCUACAGCUCCUCCAACAGGCGCCGCUGAUAGCAUCAGACCUCCACCUUAUAGCCCC

[0268] Hence, preferably the RNA construct comprises a sequence substantially as set out in SEQ ID No: 134, or a fragment or variant thereof.

[0269] In one embodiment, the at least one IIP is DANV Z protein (B1NX60; RING finger protein Z Dandenong virus), or an orthologue thereof. One embodiment of the polypeptide sequence of DANV Z is represented herein as SEQ ID No: 135, as follows:

[SEQ ID No: 135]
MGQAKSKETKLSKKEDRAEVLPDATYLGPLNCKSCWQRFDSLVRCHDHYLCRQCLNLLLTVSDRCPLCKHPLPTKLRV
STAPSSPPPYEE

[0270] Therefore, preferably the RNA construct comprises a nucleotide sequence which encodes an amino acid sequence substantially as set out in SEQ ID No: 135, or a variant or fragment thereof.

[0271] In one embodiment, the DANV Z polypeptide is encoded by the DNA nucleotide sequence of SEQ ID No: 136, as follows:

[SEQ ID No: 136]
ATGGGTCAAGCAAAATCCAAAGAAACAAAGCTCTCCAAGAAAGAGGACAGAGCAGAGGTTCTACCTGACGCAACCTAT
CTTGGTCCTCTGAACTGCAAATCATGCTGGCAAAGGTTCGACAGTTTGGTTAGGTGCCATGACCACTACCTATGCAGG
CAATGTCTGAACCTTTTGTTGACAGTCTCAGACAGATGCCCTCTCTGCAAACACCCTCTACCGACCAAGCTGAGGGTG
TCGACAGCCCCCAGCTCACCTCCCCCCTACGAGGAG

[0272] Accordingly, preferably the DANV Z polypeptide is encoded by the DNA nucleotide sequence substantially as set out in SEQ ID NO: 136, or a variant or fragment thereof.

[0273] One embodiment of codon optimised nucleic acid (DNA) encoding the DANV Z polypeptide is provided herein as SEQ ID No: 137, as follows:

[SEQ ID No: 137]
ATGGGCCAAGCCAAGAGCAAAGAGACAAAGCTGAGCAAGAAAGAGGACCGCGCCGAGGTTCTGCCCGATGCCACATAT
CTGGGCCCTCTGAACTGCAAGAGCTGCTGGCAGAGATTCGACAGCCTCGTGCGGTGCCACGATCACTACCTGTGCAGA
CAGTGCCTGAACCTGCTGCTGACCGTGTCCGATAGATGCCCTCTGTGCAAGCACCCTCTGCCTACCAAGCTGAGAGTG
TCCACCGCTCCTAGCAGCCCTCCACCTTATGAGGAA

[0274] Hence, preferably the RNA construct is encoded by a DNA sequence substantially as set out in SEQ ID No: 137, or a fragment or variant thereof.

[0275] In an embodiment, the RNA sequence corresponding to the codon optimised DNA sequence of SEQ ID No: 137 is provided herein as SEQ ID No: 138, as follows:

[SEQ ID No: 138]
AUGGGCCAAGCCAAGAGCAAAGAGACAAAGCUGAGCAAGAAAGAGGACCGCGCCGAGGUUCUGCCCGAUGCCACAUAU
CUGGGCCCUCUGAACUGCAAGAGCUGCUGGCAGAGAUUCGACAGCCUCGUGCGGUGCCACGAUCACUACCUGUGCAGA
CAGUGCCUGAACCUGCUGCUGACCGUGUCCGAUAGAUGCCCUCUGUGCAAGCACCCUCUGCCUACCAAGCUGAGAGUG
UCCACCGCUCCUAGCAGCCCUCCACCUUAUGAGGAA

[0276] Hence, preferably the RNA construct comprises a sequence substantially as set out in SEQ ID No: 138, or a fragment or variant thereof.

[0277] In one embodiment, the at least one IIP is LCMV Z protein (P18541; RING finger protein Z Lymphocytic choriomeningitis virus (strain Armstong), or an orthologue thereof. One embodiment of the polypeptide sequence of LCMV Z protein is represented herein as SEQ ID No: 139, as follows:

[SEQ ID No: 139]
MGQGKSREEKGINSTNRAEILPDTTYLGPLSCKSCWQKFDSLVRCHDHYLCRHCLNLLLSVSDRCPLCKYPLPTRLKI
STAPSSPPPYEE

[0278] Therefore, preferably the RNA construct comprises a nucleotide sequence which encodes an amino acid sequence substantially as set out in SEQ ID No: 139, or a variant or fragment thereof.

[0279] In one embodiment, the LCMV Z polypeptide is encoded by the DNA nucleotide sequence of SEQ ID No: 140, as follows:

[SEQ ID No: 140]
ATGGGTCAAGGCAAGTCCAGAGAGGAGAAAGGCACCAATAGTACAAACAGGGCCGAAATCCTACCAGATACCACCTAT
CTTGGCCCTTTAAGCTGCAAATCTTGCTGGCAGAAATTTGACAGCTTGGTAAGATGCCATGACCACTACCTTTGCAGG
CACTGTTTAAACCTTCTGCTGTCAGTATCCGACAGGTGTCCTCTTTGTAAATATCCATTACCAACCAGATTGAAGATA
TCAACAGCCCCAAGCTCTCCACCTCCCTACGAAGAG

[0280] Accordingly, preferably the LCMV Z polypeptide is encoded by the DNA nucleotide sequence substantially as set out in SEQ ID NO: 140, or a variant or fragment thereof.

[0281] One embodiment of codon optimised nucleic acid (DNA) encoding the LCMV Z polypeptide is provided herein as SEQ ID No: 141, as follows:

[SEQ ID No: 141]
ATGGGCCAGGGCAAGTCCAGAGAGGAAAAGGGCACCAACTCCACCAACCGGGCCGAGATCCTGCCTGACACCACATAT
CTGGGCCCTCTGAGCTGCAAGAGCTGCTGGCAGAAATTCGACAGCCTCGTGCGGTGCCACGACCACTACCTGTGTAGA
CACTGCCTGAACCTGCTGCTGAGCGTGTCCGATAGATGCCCTCTGTGCAAGTACCCTCTGCCTACCAGACTGAAGATC
AGCACAGCCCCTAGCAGCCCTCCACCTTACGAAGAA

[0282] Hence, preferably the RNA construct is encoded by a DNA sequence substantially as set out in SEQ ID No: 141, or a fragment or variant thereof.

[0283] In an embodiment, the RNA sequence corresponding to the codon optimised DNA sequence of SEQ ID No: 141 is provided herein as SEQ ID No: 142, as follows:

[SEQ ID No: 142]
AUGGGCCAGGGCAAGUCCAGAGAGGAAAAGGGCACCAACUCCACCAACCGGGCCGAGAUCCUGCCUGACACCACAUAU
CUGGGCCCUCUGAGCUGCAAGAGCUGCUGGCAGAAAUUCGACAGCCUCGUGCGGUGCCACGACCACUACCUGUGUAGA
CACUGCCUGAACCUGCUGCUGAGCGUGUCCGAUAGAUGCCCUCUGUGCAAGUACCCUCUGCCUACCAGACUGAAGAUC
AGCACAGCCCCUAGCAGCCCUCCACCUUACGAAGAA

[0284] Hence, preferably the RNA construct comprises a sequence substantially as set out in SEQ ID No: 142, or a fragment or variant thereof.

[0285] In one embodiment, the at least one IIP is LUJV Z protein (C5ILC3; Multifunctional matrix-like protein Z Lujp mammarenavirus), or an orthologue thereof. One embodiment of the polypeptide sequence of LUJV Z protein is represented herein as SEQ ID No: 143, as follows:

[SEQ ID No: 143]
MGQRHSSGSGQPNPKPSDSDHEARRSELHSDASHLGPLNCKSCWKSKKALVKCYDHYLCLNCLSLLMGITPRCPFCYR
ELPKNLDLAEAPSAPPL

[0286] Therefore, preferably the RNA construct comprises a nucleotide sequence which encodes an amino acid sequence substantially as set out in SEQ ID No: 143, or a variant or fragment thereof.

[0287] In one embodiment, the LUJV Z polypeptide is encoded by the DNA nucleotide sequence of SEQ ID No: 144, as follows:

[SEQ ID No: 144]
ATGGGTCAGAGACATTCCTCTGGCTCCGGCCAACCCAACCCCAAGCCGAGTGACAGCGATCATGAAGCGAGAAGGTCA
GAGCTTCACTCGGACGCCTCCCATCTCGGACCTCTGAACTGCAAATCTTGCTGGAAGTCAAAGAAGGCACTGGTGAAG
TGCTATGATCACTACCTCTGTCTAAACTGCTTAAGCCTTCTAATGGGCATCACCCCAAGATGTCCCTTCTGTTACAGA
GAGCTACCCAAAAATCTGGACCTTGCAGAGGCACCAAGCGCACCACCCCTC

[0288] Accordingly, preferably the LUJV Z polypeptide is encoded by the DNA nucleotide sequence substantially as set out in SEQ ID NO: 144, or a variant or fragment thereof.

[0289] One embodiment of codon optimised nucleic acid (DNA) encoding the LUJV Z polypeptide is provided herein as SEQ ID No: 145, as follows:

[SEQ ID No: 145]
ATGGGCCAGAGACACAGCTCTGGAAGCGGCCAGCCTAATCCTAAGCCTAGCGACAGCGATCACGAGGCCAGAAGAAGC
GAGCTGCACTCCGATGCCTCTCACCTGGGACCTCTGAACTGCAAGAGCTGCTGGAAGTCCAAGAAAGCCCTGGTCAAG
TGCTACGACCACTACCTGTGCCTGAACTGCCTGAGCCTGCTGATGGGCATTACCCCTAGATGCCCCTTCTGCTACAGA
GAGCTGCCCAAGAACCTGGACCTGGCCGAAGCTCCTTCTGCTCCTCCTCTG

[0290] Hence, preferably the RNA construct is encoded by a DNA sequence substantially as set out in SEQ ID No: 145, or a fragment or variant thereof.

[0291] In an embodiment, the RNA sequence corresponding to the codon optimised DNA sequence of SEQ ID No: 145 is provided herein as SEQ ID No: 146, as follows:

[SEQ ID No: 146]
AUGGGCCAGAGACACAGCUCUGGAAGCGGCCAGCCUAAUCCUAAGCCUAGCGACAGCGAUCACGAGGCCAGAAGAAGC
GAGCUGCACUCCGAUGCCUCUCACCUGGGACCUCUGAACUGCAAGAGCUGCUGGAAGUCCAAGAAAGCCCUGGUCAAG
UGCUACGACCACUACCUGUGCCUGAACUGCCUGAGCCUGCUGAUGGGCAUUACCCCUAGAUGCCCCUUCUGCUACAGA
GAGCUGCCCAAGAACCUGGACCUGGCCGAAGCUCCUUCUGCUCCUCCUCUG

[0292] Hence, preferably the RNA construct comprises a sequence substantially as set out in SEQ ID No: 146, or a fragment or variant thereof.

[0293] In one embodiment, the at least one IIP is CHPV Z protein (B2C4J2; RING finger protein Z Chapare mammarenavirus (isolate Human/Bolivia/810419/2003), or an orthologue thereof. One embodiment of the polypeptide sequence of CHPV Z protein is represented herein as SEQ ID No: 147, as follows:

[SEQ ID No: 147]
MGNTKTKDRQYQSNSSQPTNTSAPVLLRRQAEPSLYGRHNCRCCWFADTNLVNCSNHYLCLKCLNTMLRRSNLCDICG
EELPTTIIVPVEPSAPLPGQ

[0294] Therefore, preferably the RNA construct comprises a nucleotide sequence which encodes an amino acid sequence substantially as set out in SEQ ID No: 147, or a variant or fragment thereof.

[0295] In one embodiment, the CHPV Z polypeptide is encoded by the DNA nucleotide sequence of SEQ ID No: 148, as follows:

[SEQ ID No: 148]
ATGGGTAACACCAAAACAAAGGACAGACAGTATCAATCGAACTCAAGCCAACCCACAAACACATCTGCACCAGTTCTG
CTGAGAAGGCAGGCAGAACCAAGTCTGTATGGGAGACACAACTGCAGATGCTGTTGGTTTGCAGACACAAACCTAGTC
AATTGTTCCAACCACTACCTTTGCCTTAAATGTCTGAACACAATGTTAAGAAGATCCAATCTCTGTGACATATGCGGT
GAAGAACTTCCCACAACAATCATTGTTCCAGTGGAACCATCAGCACCACTGCCCGGACAA

[0296] Accordingly, preferably the CHPV Z polypeptide is encoded by the DNA nucleotide sequence substantially as set out in SEQ ID NO: 148, or a variant or fragment thereof.

[0297] One embodiment of codon optimised nucleic acid (DNA) encoding the CHPV Z polypeptide is provided herein as SEQ ID No: 149, as follows:

[SEQ ID No: 149]
ATGGGCAACACCAAGACCAAGGACCGGCAGTACCAGAGCAACAGCAGCCAGCCTACCAACACATCTGCCCCTGTGCTG
CTGAGAAGGCAGGCCGAGCCTTCTCTGTACGGCAGACACAACTGCCGGTGCTGTTGGTTCGCCGACACCAACCTGGTC
AACTGCAGCAACCACTACCTGTGCCTGAAGTGTCTGAACACCATGCTGCGGCGGAGCAACCTGTGCGATATCTGTGGC
GAGGAACTGCCCACCACCATCATCGTGCCTGTGGAACCTTCTGCTCCTCTGCCTGGACAG

[0298] Hence, preferably the RNA construct is encoded by a DNA sequence substantially as set out in SEQ ID No: 149, or a fragment or variant thereof.

[0299] In an embodiment, the RNA sequence corresponding to the codon optimised DNA sequence of SEQ ID No: 149 is provided herein as SEQ ID No: 150, as follows:

[SEQ ID No: 150]
AUGGGCAACACCAAGACCAAGGACCGGCAGUACCAGAGCAACAGCAGCCAGCCUACCAACACAUCUGCCCCUGUGCUG
CUGAGAAGGCAGGCCGAGCCUUCUCUGUACGGCAGACACAACUGCCGGUGCUGUUGGUUCGCCGACACCAACCUGGUC
AACUGCAGCAACCACUACCUGUGCCUGAAGUGUCUGAACACCAUGCUGCGGCGGAGCAACCUGUGCGAUAUCUGUGGC
GAGGAACUGCCCACCACCAUCAUCGUGCCUGUGGAACCUUCUGCUCCUCUGCCUGGACAG

[0300] Hence, preferably the RNA construct comprises a sequence substantially as set out in SEQ ID No: 150, or a fragment or variant thereof.

[0301] In one embodiment, the at least one IIP is MACV Z protein (Q6IUF9; RING finger protein Z Machupo virus), or an orthologue thereof. One embodiment of the polypeptide sequence of MACV Z protein is represented herein as SEQ ID No: 151, as follows:

[SEQ ID No: 151]
MGNCNKPPKRPPNTQTSAAQPSAEFRRTALPSLYGRYNCKCCWFADTNLITCNDHYLCLRCHQTMLRNSELCHICWKP
LPTSITVPVEPSAPPP

[0302] Therefore, preferably the RNA construct comprises a nucleotide sequence which encodes an amino acid sequence substantially as set out in SEQ ID No: 151, or a variant or fragment thereof.

[0303] In one embodiment, the MACV Z polypeptide is encoded by the DNA nucleotide sequence of SEQ ID No: 152, as follows:

[SEQ ID No: 152]
ATGGGCAACTGTAACAAGCCTCCCAAGAGGCCTCCCAACACACAAACATCAGCCGCCCAGCCCTCAGCAGAGTTCAGG
AGAACAGCCCTACCCAGTCTCTATGGTCGCTACAACTGCAAATGTTGTTGGTTTGCCGACACAAACTTGATTACATGT
AACGACCACTACTTGTGTCTGAGATGTCATCAAACAATGCTCAGGAATTCTGAACTCTGTCACATATGCTGGAAACCA
CTACCGACATCCATCACAGTCCCCGTGGAGCCAAGCGCCCCCCCACCA

[0304] Accordingly, preferably the MACV Z polypeptide is encoded by the DNA nucleotide sequence substantially as set out in SEQ ID NO: 152, or a variant or fragment thereof.

[0305] One embodiment of codon optimised nucleic acid (DNA) encoding the MACV Z polypeptide is provided herein as SEQ ID No: 153, as follows:

[SEQ ID No: 153]
ATGGGCAACTGCAACAAGCCTCCTAAGCGGCCTCCTAACACACAGACATCTGCCGCTCAGCCTAGCGCCGAGTTCAGA
AGAACAGCCCTGCCTAGCCTGTACGGCCGGTACAACTGCAAGTGCTGTTGGTTCGCCGACACCAACCTGATCACCTGT
AACGACCACTACCTGTGCCTGCGGTGCCACCAGACCATGCTGAGAAATAGCGAGCTGTGCCACATCTGCTGGAAGCCC
CTGCCTACCAGCATCACCGTGCCTGTGGAACCTTCTGCTCCTCCTCCT

[0306] Hence, preferably the RNA construct is encoded by a DNA sequence substantially as set out in SEQ ID No: 153, or a fragment or variant thereof.

[0307] In an embodiment, the RNA sequence corresponding to the codon optimised DNA sequence of SEQ ID No: 153 is provided herein as SEQ ID No: 154, as follows:

[SEQ ID No: 154]
AUGGGCAACUGCAACAAGCCUCCUAAGCGGCCUCCUAACACACAGACAUCUGCCGCUCAGCCUAGCGCCGAGUUCAGA
AGAACAGCCCUGCCUAGCCUGUACGGCCGGUACAACUGCAAGUGCUGUUGGUUCGCCGACACCAACCUGAUCACCUGU
AACGACCACUACCUGUGCCUGCGGUGCCACCAGACCAUGCUGAGAAAUAGCGAGCUGUGCCACAUCUGCUGGAAGCCC
CUGCCUACCAGCAUCACCGUGCCUGUGGAACCUUCUGCUCCUCCUCCU

[0308] Hence, preferably the RNA construct comprises a sequence substantially as set out in SEQ ID No: 154, or a fragment or variant thereof.

[0309] In one embodiment, the at least one IIP is GTOV Z protein (Q6UY71; RING finger protein Z Guanarito mammarenavirus (isolate Human/Venezuela/NH-95551/1990), or an orthologue thereof. One embodiment of the polypeptide sequence of GTOV Z protein is represented herein as SEQ ID No: 155, as follows:

[SEQ ID No: 155]
MGNSKSKSNPSSSSESQKGAPTVTEFRRTAIHSLYGRYNCKCCWFADKNLIKCSDHYLCLRCLNVMLKNSDLCNICWE
QLPTCITVPEEPSAPPE

[0310] Therefore, preferably the RNA construct comprises a nucleotide sequence which encodes an amino acid sequence substantially as set out in SEQ ID No: 155, or a variant or fragment thereof.

[0311] In one embodiment, the GTOV Z polypeptide is encoded by the DNA nucleotide sequence of SEQ ID No: 156, as follows:

[SEQ ID No: 156]
ATGGGCAATTCAAAATCTAAATCCAACCCATCCAGTTCCTCAGAGTCTCAAAAAGGGGCACCAACAGTCACAGAATTT
AGGAGGACTGCCATTCACAGTCTCTATGGGAGGTACAACTGCAAGTGTTGCTGGTTTGCTGACAAGAATCTGATTAAA
TGCTCTGATCATTACCTCTGCTTGAGGTGTTTAAATGTCATGCTGAAAAACTCTGATCTTTGCAACATTTGTTGGGAG
CAGCTGCCCACATGCATCACAGTTCCGGAGGAGCCAAGCGCTCCACCGGAA

[0312] Accordingly, preferably the GTOV Z polypeptide is encoded by the DNA nucleotide sequence substantially as set out in SEQ ID NO: 156, or a variant or fragment thereof.

[0313] One embodiment of codon optimised nucleic acid (DNA) encoding the GTOV Z polypeptide is provided herein as SEQ ID No: 157, as follows:

[SEQ ID No: 157]
ATGGGCAACAGCAAGTCCAAGAGCAACCCCAGCAGCAGCTCCGAGTCTCAGAAAGGCGCTCCTACCGTGACCGAGTTC
AGAAGAACAGCCATCCACAGCCTGTACGGCCGGTACAACTGCAAGTGCTGTTGGTTCGCCGACAAGAACCTGATCAAG
TGCAGCGACCACTACCTGTGCCTGCGGTGCCTGAACGTGATGCTGAAGAACTCCGACCTGTGCAACATCTGCTGGGAG
CAGCTGCCTACCTGCATCACCGTGCCTGAGGAACCTTCTGCTCCTCCTGAA

[0314] Hence, preferably the RNA construct is encoded by a DNA sequence substantially as set out in SEQ ID No: 157, or a fragment or variant thereof.

[0315] In an embodiment, the RNA sequence corresponding to the codon optimised DNA sequence of SEQ ID No: 157 is provided herein as SEQ ID No: 158, as follows:

[SEQ ID No: 158]
AUGGGCAACAGCAAGUCCAAGAGCAACCCCAGCAGCAGCUCCGAGUCUCAGAAAGGCGCUCCUACCGUGACCGAGUUC
AGAAGAACAGCCAUCCACAGCCUGUACGGCCGGUACAACUGCAAGUGCUGUUGGUUCGCCGACAAGAACCUGAUCAAG
UGCAGCGACCACUACCUGUGCCUGCGGUGCCUGAACGUGAUGCUGAAGAACUCCGACCUGUGCAACAUCUGCUGGGAG
CAGCUGCCUACCUGCAUCACCGUGCCUGAGGAACCUUCUGCUCCUCCUGAA

[0316] Hence, preferably the RNA construct comprises a sequence substantially as set out in SEQ ID No: 158, or a fragment or variant thereof.

[0317] In one embodiment, the at least one IIP is JUNV Z protein (Q6IVU5; RING finger protein Z OS=Junin mammarenavirus), or an orthologue thereof. One embodiment of the polypeptide sequence of JUNV Z is represented herein as SEQ ID No: 159, as follows:

[SEQ ID No: 159]
MGNCNGASKSNQPDSSRVTQPAAEFRRVAHSSLYGRYNCKCCWFADTNLITCNDHYLCLRCHQVMLRNSDLCNICWKP
LPTTITVPVEPTAPPP

[0318] Therefore, preferably the RNA construct comprises a nucleotide sequence which encodes an amino acid sequence substantially as set out in SEQ ID No: 159, or a variant or fragment thereof.

[0319] In one embodiment, the JUNV Z polypeptide is encoded by the DNA nucleotide sequence of SEQ ID No: 160, as follows:

[SEQ ID No: 160]
ATGGGCAACTGCAACGGGGCATCCAAGTCAAACCAGCCAGACTCTTCAAGGGTCACACAGCCAGCCGCAGAATTCAGG
AGGGTGGCTCACAGCAGTCTATATGGTAGATACAACTGCAAGTGCTGCTGGTTTGCTGACACCAATCTGATAACCTGC
AATGATCACTACCTTTGTTTAAGGTGCCATCAGGTTATGTTAAGGAATTCGGACCTCTGCAATATCTGTTGGAAGCCC
CTACCTACCACAATCACAGTGCCGGTGGAGCCAACAGCACCACCACCA

[0320] Accordingly, preferably the JUNV Z polypeptide is encoded by the DNA nucleotide sequence substantially as set out in SEQ ID NO: 160, or a variant or fragment thereof.

[0321] One embodiment of codon optimised nucleic acid (DNA) encoding the JUNV Z polypeptide is provided herein as SEQ ID No: 161, as follows:

[SEQ ID No: 161]
ATGGGCAATTGCAACGGCGCCAGCAAGAGCAACCAGCCTGATAGCAGCAGAGTGACACAGCCTGCCGCCGAGTTTAGA
AGAGTGGCCCACAGCAGCCTGTACGGCCGGTACAATTGCAAGTGCTGTTGGTTCGCCGACACCAACCTGATCACCTGT
AACGACCACTACCTGTGCCTGCGGTGCCACCAAGTGATGCTGAGAAACAGCGACCTGTGCAACATCTGCTGGAAGCCC
CTGCCTACCACCATCACCGTGCCTGTGGAACCTACAGCTCCTCCTCCT

[0322] Hence, preferably the RNA construct is encoded by a DNA sequence substantially as set out in SEQ ID No: 161, or a fragment or variant thereof.

[0323] In an embodiment, the RNA sequence corresponding to the codon optimised DNA sequence of SEQ ID No: 161 is provided herein as SEQ ID No: 162, as follows:

[SEQ ID No: 162]
AUGGGCAAUUGCAACGGCGCCAGCAAGAGCAACCAGCCUGAUAGCAGCAGAGUGACACAGCCUGCCGCCGAGUUUAGA
AGAGUGGCCCACAGCAGCCUGUACGGCCGGUACAAUUGCAAGUGCUGUUGGUUCGCCGACACCAACCUGAUCACCUGU
AACGACCACUACCUGUGCCUGCGGUGCCACCAAGUGAUGCUGAGAAACAGCGACCUGUGCAACAUCUGCUGGAAGCCC
CUGCCUACCACCAUCACCGUGCCUGUGGAACCUACAGCUCCUCCUCCU

[0324] Hence, preferably the RNA construct comprises a sequence substantially as set out in SEQ ID No: 162, or a fragment or variant thereof.

[0325] In one embodiment, the at least one IIP is SABV Z protein (Q6UY62; RING finger protein Z Sabia mammarenavirus (isolate Human/Brasil/SPH114202/1990)), or an orthologue thereof. One embodiment of the polypeptide sequence of SABV Z protein is represented herein as SEQ ID No: 163, as follows:

[SEQ ID No: 163]
MGNSKSKSKLSANQYEQQTVNSTKQVAILKRQAEPSLYGRHNCRCCWFANTNLIKCSDHYICLKCLNIMLGKSSFCDI
CGEELPTSIVVPIEPSAPPPED

[0326] Therefore, preferably the RNA construct comprises a nucleotide sequence which encodes an amino acid sequence substantially as set out in SEQ ID No: 163, or a variant or fragment thereof.

[0327] In one embodiment, the SABV Z polypeptide is encoded by the DNA nucleotide sequence of SEQ ID No: 164, as follows:

[SEQ ID No: 164]
ATGGGTAACTCCAAGTCAAAATCAAAGCTGTCTGCTAACCAGTATGAACAGCAAACAGTCAATAGCACCAAACAGGTA
GCCATTTTAAAGAGACAGGCTGAACCTAGTCTGTATGGAAGACACAACTGCAGGTGCTGCTGGTTCGCCAATACAAAT
CTAATAAAATGTTCCGACCATTATATTTGTCTAAAATGTTTGAACATAATGTTGGGGAAGTCTTCTTTTTGTGACATT
TGTGGTGAAGAGCTCCCCACATCCATTGTGGTGCCCATCGAACCAAGTGCTCCACCTCCAGAAGAC

[0328] Accordingly, preferably the SABV Z polypeptide is encoded by the DNA nucleotide sequence substantially as set out in SEQ ID NO: 164, or a variant or fragment thereof.

[0329] One embodiment of codon optimised nucleic acid (DNA) encoding the SABV Z polypeptide is provided herein as SEQ ID No: 165, as follows:

[SEQ ID No: 165]
ATGGGCAACAGCAAGAGCAAGTCCAAGCTGAGCGCCAACCAGTACGAGCAGCAGACCGTGAACAGCACCAAACAGGTG
GCCATCCTGAAGAGACAGGCCGAGCCTAGCCTGTACGGCAGACACAACTGCCGGTGTTGTTGGTTCGCCAACACCAAC
CTGATCAAGTGCAGCGACCACTACATCTGCCTGAAGTGCCTGAACATCATGCTGGGCAAGAGCAGCTTCTGCGACATC
TGCGGAGAGGAACTGCCCACCTCTATCGTGGTGCCTATCGAGCCTTCTGCTCCTCCACCTGAGGAT

[0330] Hence, preferably the RNA construct is encoded by a DNA sequence substantially as set out in SEQ ID No: 165, or a fragment or variant thereof.

[0331] In an embodiment, the RNA sequence corresponding to the codon optimised DNA sequence of SEQ ID No: 165 is provided herein as SEQ ID No: 166, as follows:

[SEQ ID No: 166]
AUGGGCAACAGCAAGAGCAAGUCCAAGCUGAGCGCCAACCAGUACGAGCAGCAGACCGUGAACAGCACCAAACAGGUG
GCCAUCCUGAAGAGACAGGCCGAGCCUAGCCUGUACGGCAGACACAACUGCCGGUGUUGUUGGUUCGCCAACACCAAC
CUGAUCAAGUGCAGCGACCACUACAUCUGCCUGAAGUGCCUGAACAUCAUGCUGGGCAAGAGCAGCUUCUGCGACAUC
UGCGGAGAGGAACUGCCCACCUCUAUCGUGGUGCCUAUCGAGCCUUCUGCUCCUCCACCUGAGGAU

[0332] Hence, preferably the RNA construct comprises a sequence substantially as set out in SEQ ID No: 166, or a fragment or variant thereof.

[0333] In other embodiments, the at least one IIP may be a 3C protease protein.

[0334] In one embodiment, the at least one IIP is CV-A16 3C protease (Q9QF31; Coxsackievirus A16 (strain Tainan/5079/98 Protease 3C), or an orthologue thereof (Rui Y, Su Jm Wang H, Chang J, Wang S, Zhenf W, Cai Y, Gordy J T, Markham R, Kong W, Zhang W, Yu X-F. (2017) Disruption of MDA5-Mediated Innate Immune Responses by the 3C Proteins of Coxsackievirus A16, Coxsackievirus A6, and Enterovirus D68. J Virol 91, 13, e00546-17). One embodiment of the polypeptide sequence of CV-A16 3C protease is represented herein as SEQ ID No: 167, as follows:

[SEQ ID No: 167]
GPSLDFALSLLRRNIRQVQTDQGHFTMLGVRDRLAILPRHSQPGKTIWVEHKLINVLDAVELVDEQGVNLELTLVTLD
TNEKFRDVTKFIPETITGASDATLVINTEHMPSMFVPVGDVVQYGFLNLSGKPTHRTMMYNFPTKAGQCGGVVTSVGK
IIGIHIGGNGRQGFCAGLKRGYFASEQ

[0335] Therefore, preferably the RNA construct comprises a nucleotide sequence which encodes an amino acid sequence substantially as set out in SEQ ID No: 167, or a variant or fragment thereof.

[0336] In one embodiment, the CV-A16 3C protease polypeptide is encoded by the DNA nucleotide sequence of SEQ ID No: 168, as follows:

[SEQ ID No: 168]
GGACCGAGCTTAGACTTTGCCTTATCCCTCCTAAGGCGCAACATTAGACAGGTGCAAACCGACCAAGGACACTTCACT
ATGTTAGGGGTGCGAGATCGCCTAGCCATTTTGCCACGCCACTCGCAACCAGGAAAAACTATCTGGGTGGAGCACAAG
TTAATTAATGTGCTGGATGCTGTCGAATTAGTGGATGAGCAAGGTGTAAACTTGGAACTCACACTAGTAACCTTAGAC
ACCAACGAAAAGTTTAGGGATGTTACCAAGTTTATTCCAGAGACGATCACCGGGGCAAGCGACGCAACCTTGGTCATC
AACACTGAGCACATGCCCTCAATGTTCGTTCCAGTGGGTGATGTTGTACAATATGGATTTCTGAATCTCAGCGGTAAG
CCCACACACCGAACCATGATGTACAATTTCCCCACAAAGGCAGGACAGTGTGGAGGGGTGGTCACCTCAGTCGGTAAG
ATCATAGGAATTCACATTGGTGGGAATGGACGCCAGGGTTTCTGCGCTGGACTGAAGAGAGGCTATTTTGCCAGTGAA
CAG

[0337] Accordingly, preferably the CV-A16 3C protease polypeptide is encoded by the DNA nucleotide sequence substantially as set out in SEQ ID NO: 168, or a variant or fragment thereof.

[0338] One embodiment of codon optimised nucleic acid (DNA) encoding the CV-A16 3C protease polypeptide is provided herein as SEQ ID No: 169, as follows:

[SEQ ID No: 169]
GGCCCTTCTCTGGATTTTGCCCTGAGCCTGCTGCGGCGGAACATCAGACAGGTGCAGACAGATCAGGGCCACTTCACC
ATGCTGGGCGTCAGAGACAGACTGGCCATCCTGCCTAGACACAGCCAGCCTGGCAAGACCATCTGGGTCGAGCACAAG
CTGATCAACGTGCTGGACGCCGTGGAACTGGTGGATGAACAGGGCGTGAACCTGGAACTGACCCTGGTCACCCTGGAC
ACCAACGAGAAGTTCCGGGACGTGACCAAGTTCATCCCCGAGACAATCACCGGCGCCTCCGATGCCACACTGGTCATC
AATACCGAGCACATGCCCTCCATGTTCGTGCCTGTGGGAGATGTGGTGCAGTACGGCTTCCTGAACCTGAGCGGCAAG
CCCACACACCGGACCATGATGTACAACTTCCCTACCAAGGCCGGCCAGTGCGGCGGAGTGGTTACATCTGTGGGCAAG
ATCATCGGCATCCACATCGGCGGCAATGGCAGACAGGGATTTTGTGCCGGCCTGAAGAGAGGCTACTTCGCCTCTGAA
CAG

[0339] Hence, preferably the RNA construct is encoded by a DNA sequence substantially as set out in SEQ ID No: 169, or a fragment or variant thereof.

[0340] In an embodiment, the RNA sequence corresponding to the codon optimised DNA sequence of SEQ ID No: 169 is provided herein as SEQ ID No: 170, as follows:

[SEQ ID No: 170]
GGCCCUUCUCUGGAUUUUGCCCUGAGCCUGCUGCGGCGGAACAUCAGACAGGUGCAGACAGAUCAGGGCCACUUCACC
AUGCUGGGCGUCAGAGACAGACUGGCCAUCCUGCCUAGACACAGCCAGCCUGGCAAGACCAUCUGGGUCGAGCACAAG
CUGAUCAACGUGCUGGACGCCGUGGAACUGGUGGAUGAACAGGGCGUGAACCUGGAACUGACCCUGGUCACCCUGGAC
ACCAACGAGAAGUUCCGGGACGUGACCAAGUUCAUCCCCGAGACAAUCACCGGCGCCUCCGAUGCCACACUGGUCAUC
AAUACCGAGCACAUGCCCUCCAUGUUCGUGCCUGUGGGAGAUGUGGUGCAGUACGGCUUCCUGAACCUGAGCGGCAAG
CCCACACACCGGACCAUGAUGUACAACUUCCCUACCAAGGCCGGCCAGUGCGGCGGAGUGGUUACAUCUGUGGGCAAG
AUCAUCGGCAUCCACAUCGGCGGCAAUGGCAGACAGGGAUUUUGUGCCGGCCUGAAGAGAGGCUACUUCGCCUCUGAA
CAG

[0341] Hence, preferably the RNA construct comprises a sequence substantially as set out in SEQ ID No: 170, or a fragment or variant thereof.

[0342] In one embodiment, the at least one IIP is CV-A6 3C protease (L7P6C4; Genome polyprotein Coxsackievirus A6 Protease 3C), or an orthologue thereof. One embodiment of the polypeptide sequence of CV-A6 3C protease is represented herein as SEQ ID No: 171, as follows:

[SEQ ID No: 171]
GPSLDFALSLLRRNIRQVQTDQGHFTMLGVRDRLAVLPRHSQPGKTIWVEHKLVNVVDAVELVDEQGVNLELTLITLD
TNEKFRDITKFIPENISAASDATLVINTEHMPSMFVPVGDVVQYGFLNLSGKPTHRTMMYNFPTKAGQCGGVVTSVGK
VIGIHIGGNGRQGFCAGLKRSYF

[0343] Therefore, preferably the RNA construct comprises a nucleotide sequence which encodes an amino acid sequence substantially as set out in SEQ ID No: 171, or a variant or fragment thereof.

[0344] In one embodiment, the CV-A6 3C protease polypeptide is encoded by the DNA nucleotide sequence of SEQ ID No: 172, as follows:

[SEQ ID No: 172]
GGACCTAGCCTTGATTTTGCCCTATCCCTACTGAGAAGGAACATCAGACAAGTTCAAACGGACCAAGGGCACTTCACC
ATGCTAGGAGTCAGAGATCGCTTGGCCGTCCTCCCACGACACTCACAACCCGGAAAAACTATCTGGGTAGAGCACAAG
CTAGTGAATGTTGTGGATGCTGTCGAACTAGTGGATGAGCAGGGGGTCAACTTAGAGCTGACTTTAATCACCCTCGAC
ACTAATGAGAAGTTTAGAGACATCACCAAATTTATTCCAGAGAATATCAGCGCTGCCAGCGATGCCACTCTAGTGATT
AATACAGAGCACATGCCTTCTATGTTTGTGCCAGTAGGTGATGTTGTTCAGTATGGTTTCCTGAATCTTAGTGGGAAA
CCAACCCACCGCACTATGATGTATAACTTCCCTACCAAGGCAGGACAGTGTGGAGGGGTAGTCACATCAGTTGGAAAG
GTCATTGGTATCCACATAGGAGGCAATGGCAGGCAAGGTTTCTGTGCAGGGCTCAAGAGAAGCTACTTT

[0345] Accordingly, preferably the CV-A6 3C protease polypeptide is encoded by the DNA nucleotide sequence substantially as set out in SEQ ID NO: 172, or a variant or fragment thereof.

[0346] One embodiment of codon optimised nucleic acid (DNA) encoding the CV-A6 3C protease polypeptide is provided herein as SEQ ID No: 173, as follows:

[SEQ ID No: 173]
GGCCCTTCTCTGGATTTTGCCCTGAGCCTGCTGCGGCGGAACATCAGACAGGTGCAGACAGATCAGGGCCACTTCACC
ATGCTGGGCGTCAGAGATAGACTGGCCGTGCTGCCTAGACACAGCCAGCCTGGAAAGACCATCTGGGTCGAGCACAAG
CTGGTCAACGTGGTGGATGCCGTGGAACTGGTGGATGAGCAGGGCGTGAACCTGGAACTGACCCTGATCACCCTGGAC
ACCAACGAGAAGTTCCGGGACATCACCAAGTTCATCCCCGAGAACATCAGCGCCGCCTCCGATGCCACACTGGTCATC
AATACCGAGCACATGCCCTCCATGTTCGTGCCTGTGGGAGATGTGGTGCAGTACGGCTTCCTGAACCTGAGCGGCAAG
CCCACACACCGGACCATGATGTACAACTTCCCTACCAAGGCCGGCCAGTGCGGCGGAGTGGTTACATCTGTGGGCAAA
GTGATCGGAATCCACATCGGCGGCAATGGCAGACAGGGCTTTTGTGCCGGCCTGAAGAGAAGCTACTTC

[0347] Hence, preferably the RNA construct is encoded by a DNA sequence substantially as set out in SEQ ID No: 173, or a fragment or variant thereof.

[0348] In an embodiment, the RNA sequence corresponding to the codon optimised DNA sequence of SEQ ID No: 173 is provided herein as SEQ ID No: 174, as follows:

[SEQ ID No: 174]
GGCCCUUCUCUGGAUUUUGCCCUGAGCCUGCUGCGGCGGAACAUCAGACAGGUGCAGACAGAUCAGGGCCACUUCACC
AUGCUGGGCGUCAGAGAUAGACUGGCCGUGCUGCCUAGACACAGCCAGCCUGGAAAGACCAUCUGGGUCGAGCACAAG
CUGGUCAACGUGGUGGAUGCCGUGGAACUGGUGGAUGAGCAGGGCGUGAACCUGGAACUGACCCUGAUCACCCUGGAC
ACCAACGAGAAGUUCCGGGACAUCACCAAGUUCAUCCCCGAGAACAUCAGCGCCGCCUCCGAUGCCACACUGGUCAUC
AAUACCGAGCACAUGCCCUCCAUGUUCGUGCCUGUGGGAGAUGUGGUGCAGUACGGCUUCCUGAACCUGAGCGGCAAG
CCCACACACCGGACCAUGAUGUACAACUUCCCUACCAAGGCCGGCCAGUGCGGCGGAGUGGUUACAUCUGUGGGCAAA
GUGAUCGGAAUCCACAUCGGCGGCAAUGGCAGACAGGGCUUUUGUGCCGGCCUGAAGAGAAGCUACUUC

[0349] Hence, preferably the RNA construct comprises a sequence substantially as set out in SEQ ID No: 174, or a fragment or variant thereof.

[0350] In one embodiment, the at least one IIP is EV D-68 3C protease (Q68T42; Genome polyprotein Human enterovirus D68; IRF7 cleavage), or an orthologue thereof (Xiang Z, Liu L, Lei X, Zhou Z, He B, Wang J (2015) 3C protease of enterovirus D68 inhibits cellular defense mediated interferon regulatory factor. J Virol., 90, 3, 1613-2161. doi: 10.1128/JVI.02395-15. Print 2016 Feb. 1). One embodiment of the polypeptide sequence of EV D-68 3C protease is represented herein as SEQ ID No: 175, as follows:

[SEQ ID No: 175]
GPGFDFAQAIMKKNTVIARTEKGEFTMLGVYDRVAVIPTHASVGEIIYINDVETRVLDACALRDLTDTNLEITIVKLD
RNQKFRDIRHFLPRCEDDYNDAVLSVHTSKFPNMYIPVGQVTNYGFLNLGGTPTHRILMYNFPTRAGQCGGVVTTTGK
VIGIHVGGNGAQGFAAMLLHSYFTDTQ

[0351] Therefore, preferably the RNA construct comprises a nucleotide sequence which encodes an amino acid sequence substantially as set out in SEQ ID No: 175, or a variant or fragment thereof.

[0352] In one embodiment, the EV D-68 3C protease polypeptide is encoded by the DNA nucleotide sequence of SEQ ID No: 176, as follows:

[SEQ ID No: 176]
GGACCAGGATTTGATTTTGCGCAAGCCATAATGAAGAAAAATACTGTTATTGCTAGAACTGAAAAAGGCGAGTTCACA
ATGCTTGGTGTGTATGATAGAGTGGCAGTCATTCCAACACATGCATCTGTTGGAGAAATCATTTACATCAACGATGTA
GAAACCAGAGTTCTAGATGCATGTGCACTTAGAGACTTGACAGACACAAACCTAGAAATAACTATAGTCAAATTGGAT
CGCAATCAAAAATTTAGAGACATCAGACACTTTTTACCCAGATGTGAGGATGATTACAATGATGCTGTGCTTAGTGTA
CATACATCAAAATTCCCTAACATGTACATTCCAGTTGGACAAGTCACTAACTACGGCTTCTTGAACCTGGGCGGCACA
CCAACACATCGGATTTTAATGTATAATTTTCCAACAAGAGCTGGTCAGTGTGGTGGTGTGGTGACAACCACAGGTAAA
GTGATAGGAATACACGTGGGCGGGAATGGAGCTCAGGGATTCGCAGCAATGTTGCTCCACTCTTACTTTACTGATACA
CAA

[0353] Accordingly, preferably the EV D-68 3C protease polypeptide is encoded by the DNA nucleotide sequence substantially as set out in SEQ ID NO: 176, or a variant or fragment thereof.

[0354] One embodiment of codon optimised nucleic acid (DNA) encoding the EV D-68 3C protease polypeptide is provided herein as SEQ ID No: 177, as follows:

[SEQ ID No: 177]
GGCCCTGGCTTTGATTTTGCCCAGGCCATCATGAAGAAAAACACCGTGATCGCCCGGACCGAGAAGGGCGAGTTTACA
ATGCTGGGCGTGTACGACAGAGTGGCCGTGATTCCTACACACGCCTCTGTGGGCGAGATCATCTACATCAACGACGTG
GAAACCAGAGTGCTGGACGCCTGCGCTCTGAGAGATCTGACCGACACCAACCTGGAAATCACCATCGTGAAGCTGGAC
CGGAACCAGAAGTTCCGGGACATCCGGCACTTTCTGCCCAGATGCGAGGACGACTACAACGACGCTGTGCTGAGCGTG
CACACCAGCAAGTTCCCCAACATGTACATCCCCGTGGGCCAAGTGACCAACTACGGCTTCCTGAATCTCGGCGGCACC
CCTACACACCGGATCCTGATGTACAACTTCCCCACCAGAGCCGGCCAGTGTGGCGGAGTGGTTACCACAACAGGCAAA
GTGATCGGCATCCACGTCGGCGGAAATGGCGCTCAGGGATTTGCTGCCATGCTGCTGCACAGCTACTTCACCGACACA
CAG

[0355] Hence, preferably the RNA construct is encoded by a DNA sequence substantially as set out in SEQ ID No: 177, or a fragment or variant thereof.

[0356] In an embodiment, the RNA sequence corresponding to the codon optimised DNA sequence of SEQ ID No: 177 is provided herein as SEQ ID No: 178, as follows:

[SEQ ID No: 178]
GGCCCUGGCUUUGAUUUUGCCCAGGCCAUCAUGAAGAAAAACACCGUGAUCGCCCGGACCGAGAAGGGCGAGUUUACA
AUGCUGGGCGUGUACGACAGAGUGGCCGUGAUUCCUACACACGCCUCUGUGGGCGAGAUCAUCUACAUCAACGACGUG
GAAACCAGAGUGCUGGACGCCUGCGCUCUGAGAGAUCUGACCGACACCAACCUGGAAAUCACCAUCGUGAAGCUGGAC
CGGAACCAGAAGUUCCGGGACAUCCGGCACUUUCUGCCCAGAUGCGAGGACGACUACAACGACGCUGUGCUGAGCGUG
CACACCAGCAAGUUCCCCAACAUGUACAUCCCCGUGGGCCAAGUGACCAACUACGGCUUCCUGAAUCUCGGCGGCACC
CCUACACACCGGAUCCUGAUGUACAACUUCCCCACCAGAGCCGGCCAGUGUGGCGGAGUGGUUACCACAACAGGCAAA
GUGAUCGGCAUCCACGUCGGCGGAAAUGGCGCUCAGGGAUUUGCUGCCAUGCUGCUGCACAGCUACUUCACCGACACA
CAG

[0357] Hence, preferably the RNA construct comprises a sequence substantially as set out in SEQ ID No: 178, or a fragment or variant thereof.

[0358] In one embodiment, the at least one IIP is EVD-71 3C protease (Q0JRV3; Genome polyprotein Human enterovirus 71 Protease 3C), or an orthologue thereof. One embodiment of the polypeptide sequence of EVD-71 3C protease protein is represented herein as SEQ ID No: 179, as follows:

[SEQ ID No: 179]
GPSLDFALSLLRRNIRQVQTDQGHFTMLGVRDHLAVLPRHSQPGKTIWVEHKLVKIVDAVELVDEQGVNLELTLVTLD
TNEKFRDITRFIPETISPASDATLVINTEHMPSMFVPVGDVVQYGFLNLSGKPTHRTMMYNFPTKAGQCGGAVTAVGK
VIGIHIGGNGRQGFCAALKRGYF

[0359] Therefore, preferably the RNA construct comprises a nucleotide sequence which encodes an amino acid sequence substantially as set out in SEQ ID No: 179, or a variant or fragment thereof.

[0360] In one embodiment, the EVD-71 3C protease polypeptide is encoded by the DNA nucleotide sequence of SEQ ID No: 180, as follows:

[SEQ ID No: 180]
GGGCCGAGCTTGGACTTCGCCCTATCTCTACTTAGGAGGAACATTAGGCAGGTCCAAACCGACCAGGGCCACTTTACA
ATGTTAGGAGTGCGAGACCACTTGGCTGTGCTCCCCAGACACTCCCAACCAGGAAAGACCATCTGGGTTGAACACAAA
TTAGTGAAGATCGTAGACGCTGTGGAGCTAGTAGATGAACAAGGGGTTAACCTAGAGCTCACACTGGTAACGCTTGAC
ACCAACGAAAAATTTAGAGACATCACAAGATTCATACCAGAAACAATTAGTCCTGCTAGTGATGCCACTTTAGTTATA
AATACTGAACATATGCCCAGTATGTTTGTGCCAGTTGGAGATGTGGTCCAGTATGGATTTTTGAACCTTAGTGGTAAG
CCCACTCACAGGACTATGATGTACAATTTCCCAACAAAAGCAGGACAGTGTGGTGGTGCTGTGACTGCCGTAGGTAAA
GTGATTGGGATTCACATTGGTGGCAACGGTAGACAAGGTTTCTGCGCTGCCCTGAAGAGGGGTTACTTT

[0361] Accordingly, preferably the EVD-71 3C protease polypeptide is encoded by the DNA nucleotide sequence substantially as set out in SEQ ID NO: 180, or a variant or fragment thereof.

[0362] One embodiment of codon optimised nucleic acid (DNA) encoding the EVD-71 3C protease polypeptide is provided herein as SEQ ID No: 181, as follows:

[SEQ ID No: 181]
GGCCCTTCTCTGGATTTTGCCCTGAGCCTGCTGCGGCGGAACATCAGACAGGTGCAGACAGATCAGGGCCACTTCACC
ATGCTGGGCGTCAGAGATCATCTGGCCGTGCTGCCTAGACACAGCCAGCCTGGAAAGACCATCTGGGTCGAGCACAAG
CTGGTCAAGATCGTGGACGCCGTGGAACTGGTGGATGAGCAGGGCGTTAACCTGGAACTGACCCTGGTCACCCTGGAC
ACCAACGAGAAGTTCCGGGACATCACCCGGTTCATCCCCGAGACAATTAGCCCTGCCTCCGACGCCACACTGGTCATC
AATACCGAGCACATGCCCTCCATGTTCGTGCCTGTGGGAGATGTGGTGCAGTACGGCTTCCTGAACCTGAGCGGCAAG
CCCACACACCGGACCATGATGTACAACTTCCCTACCAAGGCCGGCCAGTGCGGCGGAGCTGTTACAGCTGTGGGAAAA
GTGATCGGCATCCACATCGGCGGCAATGGCAGACAGGGATTCTGTGCCGCTCTGAAGAGAGGCTACTTC

[0363] Hence, preferably the RNA construct is encoded by a DNA sequence substantially as set out in SEQ ID No: 181, or a fragment or variant thereof.

[0364] In an embodiment, the RNA sequence corresponding to the codon optimised DNA sequence of SEQ ID No: 181 is provided herein as SEQ ID No: 182, as follows:

[SEQ ID No: 182]
GGCCCUUCUCUGGAUUUUGCCCUGAGCCUGCUGCGGCGGAACAUCAGACAGGUGCAGACAGAUCAGGGCCACUUCACC
AUGCUGGGCGUCAGAGAUCAUCUGGCCGUGCUGCCUAGACACAGCCAGCCUGGAAAGACCAUCUGGGUCGAGCACAAG
CUGGUCAAGAUCGUGGACGCCGUGGAACUGGUGGAUGAGCAGGGCGUUAACCUGGAACUGACCCUGGUCACCCUGGAC
ACCAACGAGAAGUUCCGGGACAUCACCCGGUUCAUCCCCGAGACAAUUAGCCCUGCCUCCGACGCCACACUGGUCAUC
AAUACCGAGCACAUGCCCUCCAUGUUCGUGCCUGUGGGAGAUGUGGUGCAGUACGGCUUCCUGAACCUGAGCGGCAAG
CCCACACACCGGACCAUGAUGUACAACUUCCCUACCAAGGCCGGCCAGUGCGGCGGAGCUGUUACAGCUGUGGGAAAA
GUGAUCGGCAUCCACAUCGGCGGCAAUGGCAGACAGGGAUUCUGUGCCGCUCUGAAGAGAGGCUACUUC

[0365] Hence, preferably the RNA construct comprises a sequence substantially as set out in SEQ ID No: 182, or a fragment or variant thereof.

[0366] In one embodiment, the at least one IIP is Polio virus HEV-C 3C protease (P03300; Genome polyprotein Poliovirus type 1 (strain Mahoney) Human Enterovirus), or an orthologue thereof. Lei X, Xiao X, Wang J (2016) Innate Immunity Evasion by Enteroviruses: Insights into Virus-Host Interaction. Viruses 8, 22; doi:10.3390/v8010022. One embodiment of the polypeptide sequence of Polio virus HEV-C 3C protease is represented herein as SEQ ID No: 183, as follows:

[SEQ ID No: 183]
GPGFDYAVAMAKRNIVTATTSKGEFTMLGVHDNVAILPTHASPGESIVIDGKEVEILDAKALEDQAGTNLEITIITLK
RNEKFRDIRPHIPTQITETNDGVLIVNTSKYPNMYVPVGAVTEQGYLNLGGRQTARTLMYNFPTRAGQCGGVITCTGK
VIGMHVGGNGSHGFAAALKRSYFTQSQ

[0367] Therefore, preferably the RNA construct comprises a nucleotide sequence which encodes an amino acid sequence substantially as set out in SEQ ID No: 183, or a variant or fragment thereof.

[0368] In one embodiment, the Polio virus HEV-C 3C protease polypeptide is encoded by the DNA nucleotide sequence of SEQ ID No: 184, as follows:

[SEQ ID No: 184]
GGACCAGGGTTCGATTACGCAGTGGCTATGGCTAAAAGAAACATTGTTACAGCAACTACTAGCAAGGGAGAGTTCACT
ATGTTAGGAGTCCACGACAACGTGGCTATTTTACCAACCCACGCTTCACCTGGTGAAAGCATTGTGATCGATGGCAAA
GAAGTGGAGATCTTGGATGCCAAAGCGCTCGAAGATCAAGCAGGAACCAATCTTGAAATCACTATAATCACTCTAAAG
AGAAATGAAAAGTTCAGAGACATTAGACCACATATACCTACTCAAATCACTGAGACAAATGATGGAGTCTTGATCGTG
AACACTAGCAAGTACCCCAATATGTATGTTCCTGTCGGTGCTGTGACTGAACAGGGATATCTAAATCTCGGTGGGCGC
CAAACTGCTCGTACTCTAATGTACAACTTTCCAACCAGAGCAGGACAGTGTGGTGGAGTCATCACATGTACTGGGAAA
GTCATCGGGATGCATGTTGGTGGGAACGGTTCACACGGGTTTGCAGCGGCCCTGAAGCGATCATACTTCACTCAGAGT
CAA

[0369] Accordingly, preferably the Polio virus HEV-C 3C protease polypeptide is encoded by the DNA nucleotide sequence substantially as set out in SEQ ID NO: 184, or a variant or fragment thereof.

[0370] One embodiment of codon optimised nucleic acid (DNA) encoding the Polio virus HEV-C 3C protease polypeptide is provided herein as SEQ ID No: 185, as follows:

[SEQ ID No: 185]
GGCCCTGGCTTTGATTATGCCGTGGCCATGGCTAAGCGGAACATCGTGACAGCCACCACCAGCAAGGGCGAGTTTACA
ATGCTGGGCGTGCACGACAACGTGGCCATCCTGCCTACACATGCTAGCCCTGGCGAGAGCATCGTGATCGACGGCAAA
GAGGTGGAAATCCTGGACGCCAAGGCTCTGGAAGATCAGGCCGGCACCAACCTGGAAATCACCATCATCACCCTGAAG
CGGAACGAGAAGTTCCGGGACATCAGACCTCACATCCCCACACAGATCACCGAGACAAACGACGGCGTGCTGATCGTG
AATACCAGCAAGTACCCCAATATGTACGTGCCCGTGGGCGCCGTGACAGAGCAGGGATATCTGAATCTCGGCGGCAGA
CAGACCGCCAGAACACTGATGTACAACTTCCCCACCAGAGCCGGCCAGTGCGGCGGAGTGATTACATGTACCGGCAAA
GTGATCGGCATGCACGTCGGCGGCAATGGCTCTCACGGATTTGCTGCCGCTCTGAAGAGAAGCTACTTCACCCAGAGC
CAG

[0371] Hence, preferably the RNA construct is encoded by a DNA sequence substantially as set out in SEQ ID No: 185, or a fragment or variant thereof.

[0372] In an embodiment, the RNA sequence corresponding to the codon optimised DNA sequence of SEQ ID No: 185 is provided herein as SEQ ID No: 186, as follows:

[SEQ ID No: 186]
GGCCCUGGCUUUGAUUAUGCCGUGGCCAUGGCUAAGCGGAACAUCGUGACAGCCACCACCAGCAAGGGCGAGUUUACA
AUGCUGGGCGUGCACGACAACGUGGCCAUCCUGCCUACACAUGCUAGCCCUGGCGAGAGCAUCGUGAUCGACGGCAAA
GAGGUGGAAAUCCUGGACGCCAAGGCUCUGGAAGAUCAGGCCGGCACCAACCUGGAAAUCACCAUCAUCACCCUGAAG
CGGAACGAGAAGUUCCGGGACAUCAGACCUCACAUCCCCACACAGAUCACCGAGACAAACGACGGCGUGCUGAUCGUG
AAUACCAGCAAGUACCCCAAUAUGUACGUGCCCGUGGGCGCCGUGACAGAGCAGGGAUAUCUGAAUCUCGGCGGCAGA
CAGACCGCCAGAACACUGAUGUACAACUUCCCCACCAGAGCCGGCCAGUGCGGCGGAGUGAUUACAUGUACCGGCAAA
GUGAUCGGCAUGCACGUCGGCGGCAAUGGCUCUCACGGAUUUGCUGCCGCUCUGAAGAGAAGCUACUUCACCCAGAGC
CAG

[0373] Hence, preferably the RNA construct comprises a sequence substantially as set out in SEQ ID No: 186, or a fragment or variant thereof.

[0374] In one embodiment, the at least one IIP is Poliovirus HEV-C 2A protease (P03300; Genome polyprotein Poliovirus type 1 (strain Mahoney) Human Enterovirus), or an orthologue thereof. Feng Q, Langeris M A, Lork M, Nguyen M, Hato S V, Lanke K, Endad L, Bhoopathi P, Fisher P B, Lloyd R E, van Kuppeveld F J M (2014) Enterovirus 2Apro targets MDA5 and MAVS in infected cells. J Virol., 88, 6, 3369-3377. One embodiment of the polypeptide sequence of Poliovirus HEV-C 2A protease is represented herein as SEQ ID No: 187, as follows:

[SEQ ID No: 187]
GFGHQNKAVYTAGYKICNYHLATQDDLQNAVNVMWSRDLLVTESRAQGTDSIARCNCNAGVYYCESRRKYYPVSFVGP
TFQYMEANNYYPARYQSHMLIGHGFASPGDCGGILRCHHGVIGIITAGGEGLVAFSDIRDLYAYEEEAMEQ

[0375] Therefore, preferably the RNA construct comprises a nucleotide sequence which encodes an amino acid sequence substantially as set out in SEQ ID No: 187, or a variant or fragment thereof.

[0376] In one embodiment, the Poliovirus HEV-C 2A protease polypeptide is encoded by the DNA nucleotide sequence of SEQ ID No: 188, as follows:

[SEQ ID No: 188]
GGATTCGGACACCAAAACAAAGCGGTGTACACTGCAGGTTACAAAATTTGCAACTACCACTTGGCCACTCAGGATGAT
TTGCAAAACGCAGTGAACGTCATGTGGAGTAGAGACCTCTTAGTCACAGAATCAAGAGCCCAGGGCACCGATTCAATC
GCAAGGTGCAATTGCAACGCAGGGGTGTACTACTGCGAGTCTAGAAGGAAATACTACCCAGTATCCTTCGTTGGCCCA
ACGTTCCAGTACATGGAGGCTAATAACTATTACCCAGCTAGGTACCAGTCCCATATGCTCATTGGCCATGGATTCGCA
TCTCCAGGGGATTGTGGTGGCATACTCAGATGTCACCACGGGGTGATAGGGATCATTACTGCTGGTGGCGAAGGGTTG
GTTGCATTTTCAGACATTAGAGACTTGTATGCCTACGAAGAAGAAGCCATGGAACAA

[0377] Accordingly, preferably the Poliovirus HEV-C 2A protease polypeptide is encoded by the DNA nucleotide sequence substantially as set out in SEQ ID NO: 188, or a variant or fragment thereof.

[0378] One embodiment of codon optimised nucleic acid (DNA) encoding the Poliovirus HEV-C 2A protease polypeptide is provided herein as SEQ ID No: 189, as follows:

[SEQ ID No: 189]
GGCTTTGGCCACCAGAACAAGGCCGTGTACACAGCCGGCTACAAGATCTGCAACTACCACCTGGCCACACAGGACGAC
CTGCAGAACGCCGTGAATGTGATGTGGTCCAGGGACCTGCTGGTCACCGAATCTAGAGCCCAGGGCACCGACTCTATC
GCCAGATGCAACTGTAATGCCGGCGTGTACTACTGCGAGAGCCGGCGGAAGTACTACCCCGTGTCTTTTGTGGGCCCC
ACCTTCCAGTACATGGAAGCCAACAACTACTACCCTGCCAGATACCAGAGCCACATGCTGATCGGCCACGGCTTTGCT
AGCCCTGGCGATTGTGGCGGCATCCTGAGATGTCACCATGGCGTGATCGGCATCATCACCGCTGGCGGAGAAGGACTG
GTGGCCTTCAGCGACATCAGAGATCTGTACGCCTACGAAGAGGAAGCCATGGAACAG

[0379] Hence, preferably the RNA construct is encoded by a DNA sequence substantially as set out in SEQ ID No: 189, or a fragment or variant thereof.

[0380] In an embodiment, the RNA sequence corresponding to the codon optimised DNA sequence of SEQ ID No: 189 is provided herein as SEQ ID No: 190, as follows:

[SEQ ID No: 190]
GGCUUUGGCCACCAGAACAAGGCCGUGUACACAGCCGGCUACAAGAUCUGCAACUACCACCUGGCCACACAGGACGAC
CUGCAGAACGCCGUGAAUGUGAUGUGGUCCAGGGACCUGCUGGUCACCGAAUCUAGAGCCCAGGGCACCGACUCUAUC
GCCAGAUGCAACUGUAAUGCCGGCGUGUACUACUGCGAGAGCCGGCGGAAGUACUACCCCGUGUCUUUUGUGGGCCCC
ACCUUCCAGUACAUGGAAGCCAACAACUACUACCCUGCCAGAUACCAGAGCCACAUGCUGAUCGGCCACGGCUUUGCU
AGCCCUGGCGAUUGUGGCGGCAUCCUGAGAUGUCACCAUGGCGUGAUCGGCAUCAUCACCGCUGGCGGAGAAGGACUG
GUGGCCUUCAGCGACAUCAGAGAUCUGUACGCCUACGAAGAGGAAGCCAUGGAACAG

[0381] Hence, preferably the RNA construct comprises a sequence substantially as set out in SEQ ID No: 190, or a fragment or variant thereof.

[0382] In one embodiment, the at least one IIP is CVB3 2A protease (P03313; Genome polyprotein Coxsackievirus B3 (strain Nancy)), or an orthologue thereof. One embodiment of the polypeptide sequence of CVB3 2A protease is represented herein as SEQ ID No: 191, as follows:

[SEQ ID No: 191]
GAFGQQSGAVYVGNYRVVNRHLATSADWQNCVWESYNRDLLVSTTTAHGCDIIARCQCTTGVYFCASKNKHYPISFEG
PGLVEVQESEYYPRRYQSHVLLAAGFSEPGDCGGILRCEHGVIGIVTMGGEGVVGFADIRDLLWLEDDAMEQ

[0383] Therefore, preferably the RNA construct comprises a nucleotide sequence which encodes an amino acid sequence substantially as set out in SEQ ID No: 191, or a variant or fragment thereof.

[0384] In one embodiment, the CVB3 2A protease polypeptide is encoded by the DNA nucleotide sequence of SEQ ID No: 192, as follows:

[SEQ ID No: 192]
GGCGCATTTGGACAACAATCAGGGGCAGTGTATGTGGGGAACTACAGGGTGGTAAATAGACATCTAGCTACCAGTGCT
GACTGGCAAAACTGTGTGTGGGAAAGTTACAACAGAGACCTCTTAGTGAGCACGACCACAGCACATGGATGTGATATT
ATAGCCAGATGICAGTGCACAACGGGAGTGTACTTTTGTGCGTCCAAAAACAAGCACTACCCAATTTCGTTTGAAGGA
CCAGGTCTAGTAGAGGTCCAAGAGAGTGAATACTACCCCAGGAGATACCAATCCCATGTGCTTTTAGCAGCTGGATTT
TCCGAACCAGGIGACTGIGGCGGTATCCTAAGGIGTGAGCATGGTGTCATTGGCATTGTGACCATGGGGGGTGAAGGC
GTGGTCGGCTTTGCAGACATCCGTGATCTCCTGTGGCTGGAAGATGATGCAATGGAACAG

[0385] Accordingly, preferably the CVB3 2A protease polypeptide is encoded by the DNA nucleotide sequence substantially as set out in SEQ ID NO: 192, or a variant or fragment thereof.

[0386] One embodiment of codon optimised nucleic acid (DNA) encoding the CVB3 2A protease polypeptide is provided herein as SEQ ID No: 193, as follows:

[SEQ ID No: 193]
GGAGCTTTTGGACAGCAGTCTGGCGCCGTGTACGTGGGCAATTACCGGGTCGTGAATAGACACCTGGCCACCTCTGCC
GACTGGCAGAATTGTGTGTGGGAGAGCTACAACCGGGACCTGCTGGTGTCTACCACAACAGCCCACGGCTGCGACATC
ATTGCCAGATGCCAGTGTACAACCGGCGTGTACTTCTGCGCCAGCAAGAACAAGCACTACCCCATCAGCTTCGAAGGC
CCTGGCCTGGTGGAAGTGCAAGAGAGCGAGTACTACCCTCGGAGATACCAGAGCCACGTGCTGCTGGCCGCTGGCTTT
TCTGAACCTGGCGATTGTGGCGGCATCCTGAGATGTGAACACGGCGTGATCGGCATCGTGACCATGGGCGGAGAAGGC
GTTGTGGGCTTCGCCGACATTAGAGATCTGCTGTGGCTGGAAGATGACGCCATGGAACAG

[0387] Hence, preferably the RNA construct is encoded by a DNA sequence substantially as set out in SEQ ID No: 193, or a fragment or variant thereof.

[0388] In an embodiment, the RNA sequence corresponding to the codon optimised DNA sequence of SEQ ID No: 193 is provided herein as SEQ ID No: 194, as follows:

[SEQ ID No: 194]
GGAGCUUUUGGACAGCAGUCUGGCGCCGUGUACGUGGGCAAUUACCGGGUCGUGAAUAGACACCUGGCCACCUCUGCC
GACUGGCAGAAUUGUGUGUGGGAGAGCUACAACCGGGACCUGCUGGUGUCUACCACAACAGCCCACGGCUGCGACAUC
AUUGCCAGAUGCCAGUGUACAACCGGCGUGUACUUCUGCGCCAGCAAGAACAAGCACUACCCCAUCAGCUUCGAAGGC
CCUGGCCUGGUGGAAGUGCAAGAGAGCGAGUACUACCCUCGGAGAUACCAGAGCCACGUGCUGCUGGCCGCUGGCUUU
UCUGAACCUGGCGAUUGUGGCGGCAUCCUGAGAUGUGAACACGGCGUGAUCGGCAUCGUGACCAUGGGCGGAGAAGGC
GUUGUGGGCUUCGCCGACAUUAGAGAUCUGCUGUGGCUGGAAGAUGACGCCAUGGAACAG

[0389] Hence, preferably the RNA construct comprises a sequence substantially as set out in SEQ ID No: 194, or a fragment or variant thereof.

[0390] In one embodiment, the at least one IIP is EV71 2A protease (B9VUU3; Genome polyprotein Human enterovirus 71), or an orthologue thereof. One embodiment of the polypeptide sequence of EV71 2A protease is represented herein as SEQ ID No: 195, as follows:

[SEQ ID No: 195]
GKFGQQSGAIYVGNFRVVNRHLATHNDWANLVWEDSSRDLLVSSTTAQGCDTIARCNCQTGVYYCNSRRKHYPVSFSK
PSLIYVEASEYYPARYQSHLMLAQGHSEPGDCGGILRCQHGVVGIVSTGGNGLVGFADVRDLLWLDEEAMEQ

[0391] Therefore, preferably the RNA construct comprises a nucleotide sequence which encodes an amino acid sequence substantially as set out in SEQ ID No: 195, or a variant or fragment thereof.

[0392] In one embodiment, the EV71 2A protease polypeptide is encoded by the DNA nucleotide sequence of SEQ ID No: 196, as follows:

[SEQ ID No: 196]
GGAAAATTTGGGCAACAGTCTGGGGCCATTTATGTGGGTAACTTTAGAGT
GGTCAACCGTCATCTTGCCACTCACAATGATTGGGCAAATCTTGTTTGGG
AAGACAGCTCTCGCGACTTACTCGTGTCATCCACCACCGCCCAAGGTTGT
GACACGATTGCCCGCTGCAATTGCCAGACAGGGGTGTACTACTGTAACTC
GAGGAGAAAACACTACCCAGTCAGTTTTTCAAAACCCAGTCTGATCTATG
TAGAGGCTAGCGAGTATTACCCAGCCAGGTACCAGTCACATCTTATGCTC
GCACAGGGCCACTCAGAGCCTGGTGATTGCGGTGGTATCCTTAGATGCCA
ACATGGCGTCGTCGGTATAGTGTCAACTGGTGGTAACGGGCTCGTTGGCT
TTGCAGACGTCAGGGACCTCTTGTGGTTAGATGAAGAAGCTATGGAGCAG

[0393] Accordingly, preferably the EV71 2A protease polypeptide is encoded by the DNA nucleotide sequence substantially as set out in SEQ ID NO: 196, or a variant or fragment thereof.

[0394] One embodiment of codon optimised nucleic acid (DNA) encoding the EV71 2A protease polypeptide is provided herein as SEQ ID No: 197, as follows:

[SEQ ID No: 197]
GGCAAGTTTGGACAGCAGAGCGGCGCCATCTACGTGGGCAATTTCCGGGT
CGTGAACCGGCACCTGGCCACACATAACGACTGGGCCAATCTCGTGTGGG
AAGATAGCAGCAGGGACCTGCTGGTGTCCAGCACAACAGCCCAGGGCTGC
GATACAATCGCCAGATGCAATTGCCAGACCGGCGTGTACTACTGCAACAG
CAGACGGAAGCACTACCCCGTGTCCTTCAGCAAGCCCAGCCTGATCTATG
TGGAAGCCAGCGAGTACTACCCCGCCAGATACCAGTCTCACCTGATGCTG
GCCCAGGGCCATTCTGAGCCAGGCGATTGTGGCGGAATCCTGAGATGCCA
GCATGGCGTCGTGGGCATTGTGTCTACCGGCGGAAATGGCCTCGTGGGAT
TTGCCGATGTTCGCGACCTGCTGTGGCTGGACGAAGAGGCTATGGAACAG

[0395] Hence, preferably the RNA construct is encoded by a DNA sequence substantially as set out in SEQ ID No: 197, or a fragment or variant thereof.

[0396] In an embodiment, the RNA sequence corresponding to the codon optimised DNA sequence of SEQ ID No: 197 is provided herein as SEQ ID No: 198, as follows:

[SEQ ID No: 198]
GGCAAGUUUGGACAGCAGAGCGGCGCCAUCUACGUGGGCAAUUUCCGGGU
CGUGAACCGGCACCUGGCCACACAUAACGACUGGGCCAAUCUCGUGUGGG
AAGAUAGCAGCAGGGACCUGCUGGUGUCCAGCACAACAGCCCAGGGCUGC
GAUACAAUCGCCAGAUGCAAUUGCCAGACCGGCGUGUACUACUGCAACAG
CAGACGGAAGCACUACCCCGUGUCCUUCAGCAAGCCCAGCCUGAUCUAUG
UGGAAGCCAGCGAGUACUACCCCGCCAGAUACCAGUCUCACCUGAUGCUG
GCCCAGGGCCAUUCUGAGCCAGGCGAUUGUGGCGGAAUCCUGAGAUGCCA
GCAUGGCGUCGUGGGCAUUGUGUCUACCGGCGGAAAUGGCCUCGUGGGAU
UUGCCGAUGUUCGCGACCUGCUGUGGCUGGACGAAGAGGCUAUGGAACAG

[0397] Hence, preferably the RNA construct comprises a sequence substantially as set out in SEQ ID No: 198, or a fragment or variant thereof.

[0398] In one embodiment, the at least one IIP is hMPV G protein (Q6WB94; Major surface glycoprotein G Human metapneumovirus (strain CAN97-83)), or an orthologue thereof. Bao X, Liu T, Shan Y, Li K, Garofolo R P, Casola A (2008) Human Metapneumovirus Glycoprotein G Inhibits Innate Immune Responses. PLOS Pathogens, 4, 5, e1000077. One embodiment of the polypeptide sequence of hMPV G protein is represented herein as SEQ ID No: 199, as follows:

[SEQ ID No: 199]
MEVKVENIRAIDMLKARVKNRVARSKCFKNASLILIGITTLSIALNIYLI
INYTIQKTSSESEHHTSSPPTESNKEASTISTDNPDINPNSQHPTQQSTE
NPTLNPAASVSPSETEPASTPDTTNRLSSVDRSTAQPSESRTKTKPTVHT
RNNPSTASSTQSPPRATTKAIRRATTFRMSSTGKRPTTTSVQSDSSTTTQ
NHEETGSANPQASVSTMQN

[0399] Therefore, preferably the RNA construct comprises a nucleotide sequence which encodes an amino acid sequence substantially as set out in SEQ ID No: 199, or a variant or fragment thereof.

[0400] In one embodiment, the hMPV G polypeptide is encoded by the DNA nucleotide sequence of SEQ ID No: 200, as follows:

[SEQ ID No: 200]
ATGGAGGTGAAAGTAGAGAACATTCGAGCAATAGACATGCTCAAAGCAAG
AGTGAAAAATCGTGTGGCACGTAGCAAATGCTTTAAAAATGCTTCTTTAA
TCCTCATAGGAATAACTACACTGAGTATAGCTCTCAATATCTATCTGATC
ATAAACTACACAATACAAAAAACCTCATCTGAATCAGAACACCACACCAG
CTCACCACCCACAGAATCCAACAAGGAAGCTTCAACAATCTCCACAGACA
ACCCAGACATCAATCCAAACTCACAGCATCCAACTCAACAGTCCACAGAA
AACCCCACACTCAACCCCGCAGCATCAGTGAGCCCATCAGAAACAGAACC
AGCATCAACACCAGACACAACAAACCGCCTGTCCTCCGTAGACAGGTCCA
CAGCACAACCAAGTGAAAGCAGAACAAAGACAAAACCGACAGTCCACACA
AGAAACAACCCAAGCACAGCTTCCAGTACACAATCCCCACCACGGGCAAC
AACGAAGGCAATCCGCAGAGCCACCACTTTCCGCATGAGCAGCACAGGAA
AAAGACCAACCACAACATCAGTCCAGTCCGACAGCAGCACCACAACCCAA
AATCATGAAGAAACAGGTTCAGCGAACCCACAGGCATCTGTAAGCACAAT
GCAAAAC

[0401] Accordingly, preferably the hMPV G polypeptide is encoded by the DNA nucleotide sequence substantially as set out in SEQ ID NO: 200, or a variant or fragment thereof.

[0402] One embodiment of codon optimised nucleic acid (DNA) encoding the hMPV G polypeptide is provided herein as SEQ ID No: 201, as follows:

[SEQ ID No: 201]
ATGGAAGTGAAGGTCGAGAACATCCGGGCCATCGACATGCTGAAGGCCAG
AGTGAAGAACAGAGTGGCCCGGTCCAAGTGCTTCAAGAACGCCAGCCTGA
TCCTGATCGGCATCACCACACTGTCTATCGCCCTGAACATCTACCTGATC
ATCAACTACACCATCCAGAAAACCAGCAGCGAGAGCGAGCACCACACAAG
CTCTCCACCTACCGAGAGCAACAAAGAGGCCAGCACCATCAGCACCGACA
ATCCCGACATCAACCCCAACTCTCAGCACCCCACACAGCAGTCCACCGAG
AATCCCACACTGAACCCTGCCGCCTCTGTGTCCCCATCTGAGACAGAACC
TGCCAGCACACCCGACACCACCAACAGACTGTCTAGCGTGGACAGAAGCA
CAGCCCAGCCTAGCGAGAGCCGGACCAAGACAAAACCTACCGTGCACACC
CGGAACAACCCTAGCACAGCCAGCTCTACACAGAGCCCTCCAAGAGCCAC
CACCAAGGCCATTAGAAGGGCCACCACCTTCCGGATGAGCAGCACCGGCA
AAAGACCTACCACCACCAGCGTGCAGAGCGACAGCAGCACAACCACACAG
AACCACGAGGAAACCGGCAGCGCCAATCCTCAGGCTAGCGTGTCCACCAT
GCAGAAC

[0403] Hence, preferably the RNA construct is encoded by a DNA sequence substantially as set out in SEQ ID No: 201, or a fragment or variant thereof.

[0404] In an embodiment, the RNA sequence corresponding to the codon optimised DNA sequence of SEQ ID No: 201 is provided herein as SEQ ID No: 202, as follows:

[SEQ ID No: 202]
AUGGAAGUGAAGGUCGAGAACAUCCGGGCCAUCGACAUGCUGAAGGCCAG
AGUGAAGAACAGAGUGGCCCGGUCCAAGUGCUUCAAGAACGCCAGCCUGA
UCCUGAUCGGCAUCACCACACUGUCUAUCGCCCUGAACAUCUACCUGAUC
AUCAACUACACCAUCCAGAAAACCAGCAGCGAGAGCGAGCACCACACAAG
CUCUCCACCUACCGAGAGCAACAAAGAGGCCAGCACCAUCAGCACCGACA
AUCCCGACAUCAACCCCAACUCUCAGCACCCCACACAGCAGUCCACCGAG
AAUCCCACACUGAACCCUGCCGCCUCUGUGUCCCCAUCUGAGACAGAACC
UGCCAGCACACCCGACACCACCAACAGACUGUCUAGCGUGGACAGAAGCA
CAGCCCAGCCUAGCGAGAGCCGGACCAAGACAAAACCUACCGUGCACACC
CGGAACAACCCUAGCACAGCCAGCUCUACACAGAGCCCUCCAAGAGCCAC
CACCAAGGCCAUUAGAAGGGCCACCACCUUCCGGAUGAGCAGCACCGGCA
AAAGACCUACCACCACCAGCGUGCAGAGCGACAGCAGCACAACCACACAG
AACCACGAGGAAACCGGCAGCGCCAAUCCUCAGGCUAGCGUGUCCACCAU
GCAGAAC

[0405] Hence, preferably the RNA construct comprises a sequence substantially as set out in SEQ ID No: 202, or a fragment or variant thereof.

[0406] The following viral IIPs are believed to cause cleavage of RIG-I.

[0407] In one embodiment, the at least one IIP is CVB3 3C protease (P03313; Genome polyprotein Coxsackievirus B3 (strain Nancy)), or an orthologue thereof. Xiao H, Li J, Yang X, Li Z, Wang Y, Rui Y, Liu R, Zhang W (2021) Ectopic Expression of TRIM25 Restores RIG-I Expression and IFN Production Reduced by Multiple Enteroviruses 3Cpro. Virol Sin: 1-12.doi: 10.1007/s12250-021-00410-x. One embodiment of the polypeptide sequence of CVB3 3C protease is represented herein as SEQ ID No: 203, as follows:

[SEQ ID No: 203]
GPAFEFAVAMMKRNSSTVKTEYGEFTMLGIYDRWAVLPRHAKPGPTILMN
DQEVGVLDAKELVDKDGTNLELTLLKLNRNEKFRDIRGFLAKEEVEVNEA
VLAINTSKFPNMYIPVGQVTEYGFLNLGGTPTKRMLMYNFPTRAGQCGGV
LMSTGKVLGIHVGGNGHQGFSAALLKHYFNDEQ

[0408] Therefore, preferably the RNA construct comprises a nucleotide sequence which encodes an amino acid sequence substantially as set out in SEQ ID No: 203, or a variant or fragment thereof.

[0409] In one embodiment, the CVB3 3C protease polypeptide is encoded by the DNA nucleotide sequence of SEQ ID No: 204, as follows:

[SEQ ID No: 204]
GGCCCTGCCTTTGAGTTCGCCGTCGCAATGATGAAAAGGAACTCAAGCAC
GGTGAAAACTGAATATGGCGAGTTTACCATGCTGGGCATCTATGACAGGT
GGGCCGTTTTGCCACGCCACGCCAAACCTGGGCCAACCATCTTGATGAAT
GATCAAGAGGTTGGTGTGCTAGATGCCAAGGAGCTAGTAGACAAGGACGG
CACCAACTTAGAACTGACACTACTCAAATTGAACCGGAATGAGAAGTTCA
GAGACATCAGAGGCTTCTTAGCCAAGGAGGAAGTGGAGGTTAATGAGGCA
GTGCTAGCAATTAACACCAGCAAGTTTCCCAACATGTACATTCCAGTAGG
ACAGGTCACAGAATACGGCTTCCTAAACCTAGGTGGCACACCCACCAAGA
GAATGCTTATGTACAACTTCCCCACAAGAGCAGGCCAGTGTGGTGGAGTG
CTCATGTCCACCGGCAAGGTACTGGGTATCCATGTTGGTGGAAATGGCCA
TCAGGGCTTCTCAGCAGCACTCCTCAAACACTACTTCAATGATGAGCAA

[0410] Accordingly, preferably the CVB3 3C protease polypeptide is encoded by the DNA nucleotide sequence substantially as set out in SEQ ID NO: 204, or a variant or fragment thereof.

[0411] One embodiment of codon optimised nucleic acid (DNA) encoding the CVB3 3C protease polypeptide is provided herein as SEQ ID No: 205, as follows:

[SEQ ID No: 205]
GGACCTGCCTTTGAATTCGCCGTGGCCATGATGAAGCGGAACAGCAGCAC
CGTGAAAACCGAGTACGGCGAGTTCACCATGCTGGGCATCTACGACAGAT
GGGCCGTGCTGCCTAGACACGCCAAACCTGGACCTACCATCCTGATGAAC
GACCAAGAAGTGGGCGTTCTGGACGCCAAAGAACTGGTGGACAAGGACGG
CACCAACCTGGAACTGACCCTGCTGAAGCTGAACCGGAACGAGAAGTTCC
GGGATATCAGAGGCTTCCTGGCCAAAGAAGAGGTGGAAGTCAACGAAGCC
GTGCTGGCCATCAACACCAGCAAGTTCCCCAACATGTACATCCCCGTGGG
CCAAGTGACAGAGTACGGCTTCCTGAATCTCGGCGGCACCCCTACCAAGC
GGATGCTGATGTACAACTTCCCCACCAGAGCCGGCCAGTGTGGCGGAGTT
CTTATGTCTACCGGCAAGGTGCTGGGAATCCACGTTGGCGGAAATGGCCA
CCAGGGCTTTTCTGCCGCTCTGCTGAAACACTACTTCAACGACGAGCAG

[0412] Hence, preferably the RNA construct is encoded by a DNA sequence substantially as set out in SEQ ID No: 205, or a fragment or variant thereof.

[0413] In an embodiment, the RNA sequence corresponding to the codon optimised DNA sequence of SEQ ID No: 205 is provided herein as SEQ ID No: 206, as follows:

[SEQ ID No: 206]
GGACCUGCCUUUGAAUUCGCCGUGGCCAUGAUGAAGCGGAACAGCAGCAC
CGUGAAAACCGAGUACGGCGAGUUCACCAUGCUGGGCAUCUACGACAGAU
GGGCCGUGCUGCCUAGACACGCCAAACCUGGACCUACCAUCCUGAUGAAC
GACCAAGAAGUGGGCGUUCUGGACGCCAAAGAACUGGUGGACAAGGACGG
CACCAACCUGGAACUGACCCUGCUGAAGCUGAACCGGAACGAGAAGUUCC
GGGAUAUCAGAGGCUUCCUGGCCAAAGAAGAGGUGGAAGUCAACGAAGCC
GUGCUGGCCAUCAACACCAGCAAGUUCCCCAACAUGUACAUCCCCGUGGG
CCAAGUGACAGAGUACGGCUUCCUGAAUCUCGGCGGCACCCCUACCAAGC
GGAUGCUGAUGUACAACUUCCCCACCAGAGCCGGCCAGUGUGGCGGAGUU
CUUAUGUCUACCGGCAAGGUGCUGGGAAUCCACGUUGGCGGAAAUGGCCA
CCAGGGCUUUUCUGCCGCUCUGCUGAAACACUACUUCAACGACGAGCAG

[0414] Hence, preferably the RNA construct comprises a sequence substantially as set out in SEQ ID No: 206, or a fragment or variant thereof.

[0415] In one embodiment, the at least one IIP is Hepatitis C NS3/4A (039929; Genome polyprotein Hepatitis C virus genotype 4a (isolate ED43)), or an orthologue thereof. One embodiment of the polypeptide sequence of Hepatitis C NS3/4A is represented herein as SEQ ID No: 207, as follows:

[SEQ ID No: 207]
APITAYAQQTRGLFSTIVTSLTGRDTNENCGEVQVLSTATQSFLGTAVNG
VMWTVYHGAGAKTISGPKGPVNQMYTNVDQDLVGWPAPPGVRSLAPCTCG
SADLYLVTRHADVIPVRRRGDTRGALLSPRPISILKGSSGGPLLCPMGHR
AGIFRAAVCTRGVAKAVDFVPVESLETTMRSPVFTDNSTPPAVPQTYQVA
HLHAPTGSGKSTKVPAAHAAQGYKVLVLNPSVAATLGFGVYMSKAYGIDP
NIRSGVRTITTGAPITYSTYGKFLADGGCSGGAYDIIICDECYSTDSTTI
LGIGTVLDQAETAGVRLTVLATATPPGSVTTPHSNIEEVALPTTGEIPFY
GKAIPLELIKGGRHLIFCHSKKKCDELARQLTSLGLNAVAYYRGLDVSVI
PTSGDVVVCATDALMTGFTGDFDSVIDCNTSVIQTVDFSLDPTFSIEITT
VPQDAVSRSQRRGRTGRGRLGTYRYVTPGERPSGMFDTAELCECYDAGCA
WYELTPAETTTRLKAYFDTPGLPVCQDHLEFWESVFTGLTHIDGHFLSQT
KQSGENFPYLVAYQATVSAKVWLAPPSWDTMWKCLIRLKPTLHGPTPLLY
RLGSVQNEVVLTHPITKYIMACMSADLEVVT

[0416] Therefore, preferably the RNA construct comprises a nucleotide sequence which encodes an amino acid sequence substantially as set out in SEQ ID No: 207, or a variant or fragment thereof.

[0417] In one embodiment, the Hepatitis C NS3/4A polypeptide is encoded by the DNA nucleotide sequence of SEQ ID No: 208, as follows:

[SEQ ID No: 208]
GCCCCCATCACAGCATACGCaCAGCAGACCCGCGGCTTGTTCAGCACCAT
CGTAACGAGCCTCACTGGCAGGGACACCAATGAGAATTGTGGCGAAGTGC
AGGTCTTATCCACCGCTACGCAGTCCTTCCTGGGTACTGCGGTTAACGGC
GTGATGTGGACCGTCTACCACGGGGCGGGTGCCAAGACCATCAGCGGCCC
GAAGGGACCTGTCAATCAAATGTACACTAATGTTGACCAAGACTTGGTGG
GGTGGCCAGCACCCCCCGGAGTCAGATCTCTTGCTCCGTGCACCTGCGGC
TCGGCAGACTTGTATCTAGTCACCAGGCACGCGGATGTAATACCCGTGCG
CAGGAGAGGAGACACCAGAGGAGCTCTCTTGAGCCCTAGACCAATATCCA
TTCTTAAGGGATCTTCCGGAGGTCCGCTGCTGTGCCCCATGGGACACCGC
GCCGGCATATTCCGTGCGGCGGTGTGTACTCGGGGGGTAGCCAAGGCGGT
AGACTTCGTCCCGGTTGAATCTCTTGAGACTACCATGAGATCACCAGTGT
TCACTGACAACTCAACACCCCCAGCAGTGCCCCAGACCTACCAGGTCGCG
CACCTACACGCACCAACAGGAAGTGGCAAGAGCACTAAGGTCCCGGCGGC
GCATGCTGCCCAAGGCTATAAAGTGCTAGTGCTCAATCCTTCGGTTGCGG
CCACACTGGGTTTTGGGGTATACATGTCCAAGGCATATGGCATCGACCCG
AACATCCGGTCGGGAGTCAGGACCATCACCACGGGTGCGCCAATCACGTA
CTCAACGTATGGTAAGTTCCTGGCTGATGGAGGTTGCAGCGGAGGGGCAT
ACGACATAATCATCTGTGACGAGTGCTATTCCACTGACTCCACAACGATC
CTTGGCATAGGCACAGTCCTGGACCAAGCGGAGACCGCTGGAGTGCGCCT
CACCGTGCTCGCGACTGCTACTCCGCCAGGGTCAGTGACTACACCTCATT
CCAACATAGAGGAGGTCGCCCTGCCAACAACGGGGGAAATACCCTTTTAC
GGCAAGGCGATCCCTCTGGAGCTGATCAAGGGGGGCAGACATCTCATCTT
CTGCCATTCAAAGAAAAAGTGCGATGAACTGGCCAGACAACTGACATCTC
TTGGTCTGAATGCCGTAGCCTACTACAGAGGCTTAGACGTTTCGGTGATT
CCCACGTCTGGGGACGTCGTGGTATGCGCCACGGACGCCCTCATGACGGG
TTTCACCGGCGACTTTGACTCAGTGATAGACTGCAATACATCTGTGATAC
AGACTGTTGACTTCAGCTTGGACCCCACCTTCTCCATAGAGATTACAACC
GTTCCCCAGGACGCGGTATCCCGCAGCCAGCGGAGAGGCCGCACTGGTAG
GGGGAGGTTGGGCACATACCGGTATGTCACCCCGGGAGAGAGACCATCAG
GCATGTTTGACACTGCAGAGCTTTGCGAGTGCTACGATGCCGGGTGCGCC
TGGTACGAGCTGACACCTGCTGAAACCACAACAAGGCTGAAAGCTTACTT
CGACACACCAGGCCTTCCTGTGTGCCAAGACCATCTGGAATTCTGGGAGA
GCGTCTTTACAGGGTTAACCCACATAGACGGTCATTTCCTATCCCAGACC
AAGCAATCGGGTGAGAATTTCCCGTATCTTGTTGCTTACCAAGCGACGGT
GTCGGCCAAGGTCTGGCTCGCTCCACCAAGCTGGGACACCATGTGGAAGT
GCCTAATTCGCCTTAAGCCCACCCTGCACGGGCCCACGCCCCTCCTCTAC
AGACTGGGGTCTGTGCAGAATGAAGTGGTGCTCACCCATCCCATCACCAA
ATACATCATGGCTTGCATGTCAGCTGATCTCGAGGTAGTGACA

[0418] Accordingly, preferably the Hepatitis C NS3/4A polypeptide is encoded by the DNA nucleotide sequence substantially as set out in SEQ ID NO: 208, or a variant or fragment thereof.

[0419] One embodiment of codon optimised nucleic acid (DNA) encoding the Hepatitis C NS3/4A polypeptide is provided herein as SEQ ID No: 209, as follows:

[SEQ ID No: 209]
GCCCCTATCACAGCCTACGCTCAGCAGACCAGAGGCCTGTTCAGCACCAT
CGTGACAAGCCTGACCGGCAGAGACACCAACGAGAATTGTGGCGAGGTGC
AGGTCCTGTCTACAGCTACCCAGAGCTTTCTGGGCACCGCCGTGAATGGC
GTGATGTGGACAGTGTATCATGGCGCTGGCGCCAAGACAATCTCTGGCCC
TAAGGGCCCCGTGAACCAGATGTACACCAACGTGGACCAGGACCTCGTTG
GCTGGCCTGCTCCTCCTGGTGTTAGAAGCCTGGCTCCTTGTACATGCGGC
AGCGCCGATCTGTACCTGGTCACAAGACACGCCGACGTGATCCCCGTCAG
AAGAAGAGGCGATACAAGAGGCGCCCTGCTGAGCCCTAGACCTATCTCTA
TCCTGAAGGGCAGCTCTGGCGGCCCTCTGCTTTGTCCTATGGGACACAGA
GCCGGCATCTTCAGAGCCGCCGTGTGTACTAGAGGCGTGGCCAAGGCTGT
GGACTTCGTGCCTGTGGAAAGCCTGGAAACCACCATGAGAAGCCCCGTGT
TCACCGACAACAGCACCCCTCCAGCTGTGCCTCAGACATACCAGGTGGCC
CATCTGCATGCCCCTACAGGCTCTGGCAAGAGCACAAAAGTGCCTGCCGC
TCATGCTGCCCAGGGCTATAAGGTGCTGGTGCTCAATCCTAGCGTGGCCG
CCACACTCGGCTTTGGCGTGTACATGTCTAAGGCCTACGGCATCGACCCC
AACATCAGATCTGGCGTGCGGACCATCACAACAGGCGCCCCAATCACCTA
CTCTACCTACGGCAAGTTCCTGGCCGATGGCGGATGTTCTGGCGGAGCCT
ACGACATCATCATCTGCGACGAGTGCTACAGCACCGACAGCACCACAATC
CTCGGCATCGGCACAGTGCTGGATCAGGCTGAAACAGCCGGCGTCAGACT
GACTGTGCTGGCCACAGCTACACCTCCAGGCAGCGTGACAACCCCTCACA
GCAACATCGAGGAAGTGGCCCTGCCTACAACCGGCGAGATCCCATTCTAT
GGCAAGGCCATTCCTCTCGAGCTGATCAAAGGCGGCAGACACCTGATCTT
TTGCCACAGCAAGAAGAAGTGCGACGAGCTGGCCAGACAGCTGACATCCC
TGGGACTGAATGCCGTGGCCTACTACAGAGGACTGGACGTGTCCGTGATT
CCCACATCTGGCGACGTGGTCGTGTGTGCCACAGATGCCCTGATGACCGG
CTTCACCGGCGACTTCGATAGCGTGATCGACTGCAACACCAGCGTGATCC
AGACCGTGGACTTCTCTCTGGACCCCACCTTCAGCATCGAGATCACCACC
GTTCCTCAGGACGCCGTGTCTCGGTCACAGAGAAGAGGCAGAACAGGCAG
AGGCCGGCTGGGCACATACAGATATGTGACACCCGGCGAAAGACCCAGCG
GCATGTTTGATACAGCCGAGCTGTGCGAGTGTTACGACGCCGGATGTGCT
TGGTACGAGCTGACACCAGCCGAGACAACCACCAGACTGAAGGCCTACTT
CGACACCCCTGGCCTGCCTGTGTGTCAGGACCACCTGGAATTTTGGGAGA
GCGTGTTCACAGGACTGACCCACATCGACGGCCACTTTCTGAGCCAGACC
AAGCAGAGCGGCGAGAACTTCCCTTACCTGGTGGCCTATCAGGCTACCGT
GTCCGCCAAAGTTTGGCTGGCTCCTCCTAGCTGGGACACCATGTGGAAGT
GCCTGATCCGGCTGAAGCCTACACTGCACGGACCTACACCTCTGCTGTAC
AGACTGGGCAGCGTGCAGAATGAGGTGGTGCTGACCCATCCTATCACCAA
GTACATCATGGCCTGCATGAGCGCCGACCTGGAAGTGGTTACA

[0420] Hence, preferably the RNA construct is encoded by a DNA sequence substantially as set out in SEQ ID No: 209, or a fragment or variant thereof.

[0421] In an embodiment, the RNA sequence corresponding to the codon optimised DNA sequence of SEQ ID No: 209 is provided herein as SEQ ID No: 210, as follows:

[SEQ ID No: 210]
GCCCCUAUCACAGCCUACGCUCAGCAGACCAGAGGCCUGUUCAGCACCAU
CGUGACAAGCCUGACCGGCAGAGACACCAACGAGAAUUGUGGCGAGGUGC
AGGUCCUGUCUACAGCUACCCAGAGCUUUCUGGGCACCGCCGUGAAUGGC
GUGAUGUGGACAGUGUAUCAUGGCGCUGGCGCCAAGACAAUCUCUGGCCC
UAAGGGCCCCGUGAACCAGAUGUACACCAACGUGGACCAGGACCUCGUUG
GCUGGCCUGCUCCUCCUGGUGUUAGAAGCCUGGCUCCUUGUACAUGCGGC
AGCGCCGAUCUGUACCUGGUCACAAGACACGCCGACGUGAUCCCCGUCAG
AAGAAGAGGCGAUACAAGAGGCGCCCUGCUGAGCCCUAGACCUAUCUCUA
UCCUGAAGGGCAGCUCUGGCGGCCCUCUGCUUUGUCCUAUGGGACACAGA
GCCGGCAUCUUCAGAGCCGCCGUGUGUACUAGAGGCGUGGCCAAGGCUGU
GGACUUCGUGCCUGUGGAAAGCCUGGAAACCACCAUGAGAAGCCCCGUGU
UCACCGACAACAGCACCCCUCCAGCUGUGCCUCAGACAUACCAGGUGGCC
CAUCUGCAUGCCCCUACAGGCUCUGGCAAGAGCACAAAAGUGCCUGCCGC
UCAUGCUGCCCAGGGCUAUAAGGUGCUGGUGCUCAAUCCUAGCGUGGCCG
CCACACUCGGCUUUGGCGUGUACAUGUCUAAGGCCUACGGCAUCGACCCC
AACAUCAGAUCUGGCGUGCGGACCAUCACAACAGGCGCCCCAAUCACCUA
CUCUACCUACGGCAAGUUCCUGGCCGAUGGCGGAUGUUCUGGCGGAGCCU
ACGACAUCAUCAUCUGCGACGAGUGCUACAGCACCGACAGCACCACAAUC
CUCGGCAUCGGCACAGUGCUGGAUCAGGCUGAAACAGCCGGCGUCAGACU
GACUGUGCUGGCCACAGCUACACCUCCAGGCAGCGUGACAACCCCUCACA
GCAACAUCGAGGAAGUGGCCCUGCCUACAACCGGCGAGAUCCCAUUCUAU
GGCAAGGCCAUUCCUCUCGAGCUGAUCAAAGGCGGCAGACACCUGAUCUU
UUGCCACAGCAAGAAGAAGUGCGACGAGCUGGCCAGACAGCUGACAUCCC
UGGGACUGAAUGCCGUGGCCUACUACAGAGGACUGGACGUGUCCGUGAUU
CCCACAUCUGGCGACGUGGUCGUGUGUGCCACAGAUGCCCUGAUGACCGG
CUUCACCGGCGACUUCGAUAGCGUGAUCGACUGCAACACCAGCGUGAUCC
AGACCGUGGACUUCUCUCUGGACCCCACCUUCAGCAUCGAGAUCACCACC
GUUCCUCAGGACGCCGUGUCUCGGUCACAGAGAAGAGGCAGAACAGGCAG
AGGCCGGCUGGGCACAUACAGAUAUGUGACACCCGGCGAAAGACCCAGCG
GCAUGUUUGAUACAGCCGAGCUGUGCGAGUGUUACGACGCCGGAUGUGCU
UGGUACGAGCUGACACCAGCCGAGACAACCACCAGACUGAAGGCCUACUU
CGACACCCCUGGCCUGCCUGUGUGUCAGGACCACCUGGAAUUUUGGGAGA
GCGUGUUCACAGGACUGACCCACAUCGACGGCCACUUUCUGAGCCAGACC
AAGCAGAGCGGCGAGAACUUCCCUUACCUGGUGGCCUAUCAGGCUACCGU
GUCCGCCAAAGUUUGGCUGGCUCCUCCUAGCUGGGACACCAUGUGGAAGU
GCCUGAUCCGGCUGAAGCCUACACUGCACGGACCUACACCUCUGCUGUAC
AGACUGGGCAGCGUGCAGAAUGAGGUGGUGCUGACCCAUCCUAUCACCAA
GUACAUCAUGGCCUGCAUGAGCGCCGACCUGGAAGUGGUUACA

[0422] Hence, preferably the RNA construct comprises a sequence substantially as set out in SEQ ID No: 210, or a fragment or variant thereof.

[0423] In one embodiment, the at least one IIP is DENV NS3 protein (P17763; Genome polyprotein Dengue virus type 1 (strain Nauru/West Pac/1974)), or an orthologue thereof. One embodiment of the polypeptide sequence of DENV NS3 protein is represented herein as SEQ ID No: 211, as follows:

[SEQ ID No: 211]
SGVLWDTPSPPEVERAVLDDGIYRILQRGLLGRSQVGVGVFQEGVFHTMWHVTRGAVLMYQGKRLEPSWASVKKDLIS
YGGGWRFQGSWNAGEEVQVIAVEPGKNPKNVQTAPGTFKTPEGEVGAIALDFKPGTSGSPIVNREGKIVGLYGNGVVT
TSGTYVSAIAQAKASQEGPLPEIEDEVFRKRNLTIMDLHPGSGKTRRYLPAIVREAIRRNVRTLVLAPTRVVASEMAE
ALKGMPIRYQTTAVKSEHTGKEIVDLMCHATFTMRLLSPVRVPNYNMIIMDEAHFTDPASIAARGYISTRVGMGEAAA
IFMTATPPGSVEAFPQSNAVIQDEERDIPERSWNSGYDWITDFPGKTVWFVPSIKSGNDIANCLRKNGKRVVQLSRKT
FDTEYQKTKNNDWDYVVTTDISEMGANFRADRVIDPRRCLKPVILKDGPERVILAGPMPVTVASAAQRRGRIGRNQNK
EGDQYIYMGQPLNNDEDHAHWTEAKMLLDNINTPEGIIPALFEPEREKSAAIDGEYRLRGEARKTFVELMRRGDLPVW
LSYKVASEGFQYSDRRWCFDGERNNQVLEENMDVEIWTKEGERKKLRPRWLDARTYSDPLALREFKEFAAGRR

[0424] Therefore, preferably the RNA construct comprises a nucleotide sequence which encodes an amino acid sequence substantially as set out in SEQ ID No: 211, or a variant or fragment thereof.

[0425] In one embodiment, the DENV NS3 polypeptide is encoded by the DNA nucleotide sequence of SEQ ID No: 212, as follows:

[SEQ ID No: 212]
TCAGGAGTGCTATGGGACACACCCAGCCCTCCAGAAGTGGAAAGAGCAGTCCTTGATGATGGCATTTATAGAATTCTC
CAAAGAGGATTGTTGGGCAGGTCTCAAGTAGGAGTAGGAGTTTTTCAAGAAGGCGTGTTCCACACAATGTGGCACGTC
ACCAGGGGAGCTGTCCTCATGTACCAAGGGAAGAGACTGGAACCAAGTTGGGCCAGTGTCAAAAAAGACTTGATCTCA
TATGGAGGAGGTTGGAGGTTTCAAGGATCCTGGAACGCGGGAGAAGAAGTGCAGGTGATTGCTGTTGAACCGGGGAAG
AACCCCAAAAATGTACAGACAGCGCCGGGTACCTTCAAGACCCCTGAAGGCGAAGTTGGAGCCATAGCTCTAGACTTT
AAACCCGGCACATCTGGATCTCCTATCGTGAACAGAGAGGGAAAAATAGTAGGTCTTTATGGAAATGGAGTGGTGACA
ACAAGTGGTACCTACGTCAGCGCCATAGCTCAAGCTAAAGCATCACAAGAAGGGCCTCTACCAGAGATTGAGGACGAG
GTGTTTAGGAAAAGAAACTTAACAATAATGGACCTACATCCAGGATCGGGGAAAACAAGAAGATATCTTCCAGCCATA
GTCCGTGAGGCCATAAGAAGGAACGTGCGCACGCTAGTCTTAGCTCCCACAAGAGTTGTCGCTTCTGAAATGGCAGAG
GCGCTCAAGGGAATGCCAATAAGGTATCAGACAACAGCAGTGAAGAGTGAACACACAGGAAAAGAGATAGTTGACCTT
ATGTGTCACGCCACTTTCACTATGCGTCTCCTGTCTCCTGTGAGAGTTCCCAATTATAATATGATTATCATGGATGAA
GCACATTTTACCGATCCAGCCAGCATAGCAGCCAGAGGGTATATCTCAACCCGAGTGGGTATGGGTGAAGCAGCTGCG
ATTTTCATGACAGCCACTCCCCCCGGATCGGTGGAGGCCTTTCCACAGAGCAATGCAGTTATCCAAGATGAGGAAAGA
GACATTCCTGAAAGATCATGGAACTCAGGCTATGACTGGATCACTGATTTCCCAGGTAAAACAGTCTGGTTTGTTCCA
AGCATCAAATCAGGAAATGACATTGCCAACTGTTTAAGAAAGAATGGGAAACGGGTGGTCCAATTGAGCAGAAAAACT
TTTGACACTGAGTACCAGAAAACAAAAAATAACGACTGGGACTATGTTGTCACAACAGACATATCCGAAATGGGAGCA
AACTTCCGAGCCGACAGGGTAATAGACCCGAGGCGGTGCCTGAAACCGGTAATACTAAAAGATGGCCCAGAGCGTGTC
ATTCTAGCCGGACCGATGCCAGTTGACTGTGGCTAGCGCCGCCCAGAGGAGAGGAAGAATTGGAAGGAACCAAAATAAG
GAAGGCGATCAGTATATTTACATGGGACAGCCTCTAAACAATGATGAGGACCACGCCCATTGGACAGAAGCAAAAATG
CTCCTTGACAACATAAACACACCAGAAGGGATTATCCCAGCCCTCTTTGAGCCGGAGAGAGAAAAGAGTGCAGCAATA
GACGGGGAATACAGACTACGGGGTGAAGCGAGGAAAACGTTCGTGGAGCTCATGAGAAGAGGAGATCTACCTGTCTGG
CTATCCTACAAAGTTGCCTCAGAAGGCTTCCAGTACTCCGACAGAAGGTGGTGCTTTGATGGGGAAAGGAACAACCAG
GTGTTGGAGGAGAACATGGACGTGGAGATCTGGACAAAAGAAGGAGAAAGAAAGAAACTACGACCCCGCTGGCTGGAT
GCCAGAACATACTCTGACCCACTGGCTCTGCGCGAATTCAAAGAGTTCGCAGCAGGAAGAAGA

[0426] Accordingly, preferably the DENV NS3 polypeptide is encoded by the DNA nucleotide sequence substantially as set out in SEQ ID NO: 212, or a variant or fragment thereof.

[0427] One embodiment of codon optimised nucleic acid (DNA) encoding the DENV NS3 polypeptide is provided herein as SEQ ID No: 213, as follows:

[SEQ ID No: 213]
TCTGGCGTGCTGTGGGATACACCTTCTCCACCAGAGGTGGAAAGAGCCGTGCTGGACGACGGCATCTACCGGATTCTG
CAGAGAGGACTGCTGGGCAGATCTCAAGTTGGCGTGGGCGTGTTCCAAGAAGGGGTGTTCCACACCATGTGGCACGTG
ACAAGAGGCGCCGTGCTGATGTACCAGGGCAAGAGACTGGAACCTAGCTGGGCCAGCGTGAAGAAGGACCTGATCTCT
TACGGCGGAGGCTGGCGGTTTCAAGGCTCTTGGAATGCCGGCGAAGAGGTGCAAGTGATCGCCGTGGAACCCGGCAAG
AACCCCAAGAACGTTCAGACAGCCCCTGGCACCTTCAAGACCCCTGAAGGCGAAGTGGGAGCTATCGCCCTGGATTTC
AAGCCTGGCACAAGCGGCAGCCCCATCGTGAACAGAGAAGGCAAGATCGTGGGCCTGTACGGCAATGGCGTGGTCACC
ACATCTGGCACCTACGTGTCAGCCATTGCTCAGGCCAAGGCCTCTCAAGAGGGACCCCTGCCTGAGATCGAGGACGAG
GTGTTCCGGAAGCGGAACCTGACCATCATGGATCTGCACCCTGGCAGCGGCAAGACCAGAAGATATCTGCCCGCCATT
GTGCGCGAGGCCATCCGAAGAAATGTGCGGACACTGGTGCTGGCCCCTACAAGAGTGGTGGCCTCTGAAATGGCCGAG
GCTCTGAAGGGCATGCCTATCAGATACCAGACCACCGCCGTGAAGTCTGAGCACACCGGCAAAGAAATCGTGGACCTG
ATGTGCCACGCCACCTTCACCATGAGACTGCTGAGCCCTGTGCGGGTGCCCAACTACAACATGATCATCATGGACGAG
GCCCACTTCACAGACCCCGCCTCTATTGCCGCCAGAGGCTACATCTCTACCAGAGTCGGCATGGGAGAAGCCGCCGCT
ATCTTCATGACAGCCACACCTCCAGGCAGCGTGGAAGCCTTTCCTCAGTCCAATGCCGTGATCCAGGACGAAGAGAGA
GACATCCCCGAGCGGAGCTGGAACAGCGGCTACGACTGGATCACCGACTTTCCAGGCAAGACCGTTTGGTTCGTGCCC
AGCATCAAGAGCGGCAACGATATCGCCAACTGCCTGCGGAAGAACGGCAAGAGAGTGGTGCAGCTGAGCAGAAAGACC
TTCGACACCGAGTACCAAAAGACCAAGAACAACGACTGGGACTACGTCGTGACCACCGACATCTCTGAGATGGGCGCC
AACTTCAGGGCCGACAGAGTGATCGACCCTCGGAGATGTCTGAAGCCCGTGATCCTGAAGGACGGCCCTGAGAGAGTG
ATTCTGGCCGGACCTATGCCTGTGACAGTGGCTTCTGCCGCTCAGAGAAGAGGCCGGATCGGCCGGAATCAGAACAAA
GAGGGCGACCAGTACATCTACATGGGCCAGCCTCTGAACAACGATGAGGATCACGCCCACTGGACCGAGGCCAAGATG
CTGCTGGACAACATCAACACCCCTGAGGGCATCATCCCCGCTCTGTTCGAGCCCGAGAGAGAGAAGTCTGCCGCAATC
GACGGCGAGTACAGACTGAGAGGCGAGGCCAGAAAGACATTTGTGGAACTGATGCGGAGAGGCGACCTGCCTGTGTGG
CTGAGTTACAAGGTGGCCAGCGAGGGCTTCCAGTACAGCGATAGAAGATGGTGCTTCGATGGCGAGCGGAACAACCAG
GTGCTGGAAGAGAACATGGACGTGGAAATCTGGACCAAAGAAGGCGAGCGCAAGAAACTGCGGCCCAGATGGCTGGAT
GCCCGGACATATTCTGACCCTCTGGCTCTGCGCGAGTTCAAAGAGTTTGCCGCCGGAAGAAGA

[0428] Hence, preferably the RNA construct is encoded by a DNA sequence substantially as set out in SEQ ID No: 213, or a fragment or variant thereof.

[0429] In an embodiment, the RNA sequence corresponding to the codon optimised DNA sequence of SEQ ID No: 213 is provided herein as SEQ ID No: 214, as follows:

[SEQ ID No: 214]
UCUGGCGUGCUGUGGGAUACACCUUCUCCACCAGAGGUGGAAAGAGCCGUGCUGGACGACGGCAUCUACCGGAUUCUG
CAGAGAGGACUGCUGGGCAGAUCUCAAGUUGGCGUGGGCGUGUUCCAAGAAGGGGUGUUCCACACCAUGUGGCACGUG
ACAAGAGGCGCCGUGCUGAUGUACCAGGGCAAGAGACUGGAACCUAGCUGGGCCAGCGUGAAGAAGGACCUGAUCUCU
UACGGCGGAGGCUGGCGGUUUCAAGGCUCUUGGAAUGCCGGCGAAGAGGUGCAAGUGAUCGCCGUGGAACCCGGCAAG
AACCCCAAGAACGUUCAGACAGCCCCUGGCACCUUCAAGACCCCUGAAGGCGAAGUGGGAGCUAUCGCCCUGGAUUUC
AAGCCUGGCACAAGCGGCAGCCCCAUCGUGAACAGAGAAGGCAAGAUCGUGGGCCUGUACGGCAAUGGCGUGGUCACC
ACAUCUGGCACCUACGUGUCAGCCAUUGCUCAGGCCAAGGCCUCUCAAGAGGGACCCCUGCCUGAGAUCGAGGACGAG
GUGUUCCGGAAGCGGAACCUGACCAUCAUGGAUCUGCACCCUGGCAGCGGCAAGACCAGAAGAUAUCUGCCCGCCAUU
GUGCGCGAGGCCAUCCGAAGAAAUGUGCGGACACUGGUGCUGGCCCCUACAAGAGUGGUGGCCUCUGAAAUGGCCGAG
GCUCUGAAGGGCAUGCCUAUCAGAUACCAGACCACCGCCGUGAAGUCUGAGCACACCGGCAAAGAAAUCGUGGACCUG
AUGUGCCACGCCACCUUCACCAUGAGACUGCUGAGCCCUGUGCGGGUGCCCAACUACAACAUGAUCAUCAUGGACGAG
GCCCACUUCACAGACCCCGCCUCUAUUGCCGCCAGAGGCUACAUCUCUACCAGAGUCGGCAUGGGAGAAGCCGCCGCU
AUCUUCAUGACAGCCACACCUCCAGGCAGCGUGGAAGCCUUUCCUCAGUCCAAUGCCGUGAUCCAGGACGAAGAGAGA
GACAUCCCCGAGCGGAGCUGGAACAGCGGCUACGACUGGAUCACCGACUUUCCAGGCAAGACCGUUUGGUUCGUGCCC
AGCAUCAAGAGCGGCAACGAUAUCGCCAACUGCCUGCGGAAGAACGGCAAGAGAGUGGUGCAGCUGAGCAGAAAGACC
UUCGACACCGAGUACCAAAAGACCAAGAACAACGACUGGGACUACGUCGUGACCACCGACAUCUCUGAGAUGGGCGCC
AACUUCAGGGCCGACAGAGUGAUCGACCCUCGGAGAUGUCUGAAGCCCGUGAUCCUGAAGGACGGCCCUGAGAGAGUG
AUUCUGGCCGGACCUAUGCCUGUGACAGUGGCUUCUGCCGCUCAGAGAAGAGGCCGGAUCGGCCGGAAUCAGAACAAA
GAGGGCGACCAGUACAUCUACAUGGGCCAGCCUCUGAACAACGAUGAGGAUCACGCCCACUGGACCGAGGCCAAGAUG
CUGCUGGACAACAUCAACACCCCUGAGGGCAUCAUCCCCGCUCUGUUCGAGCCCGAGAGAGAGAAGUCUGCCGCAAUC
GACGGCGAGUACAGACUGAGAGGCGAGGCCAGAAAGACAUUUGUGGAACUGAUGCGGAGAGGCGACCUGCCUGUGUGG
CUGAGUUACAAGGUGGCCAGCGAGGGCUUCCAGUACAGCGAUAGAAGAUGGUGCUUCGAUGGCGAGCGGAACAACCAG
GUGCUGGAAGAGAACAUGGACGUGGAAAUCUGGACCAAAGAAGGCGAGCGCAAGAAACUGCGGCCCAGAUGGCUGGAU
GCCCGGACAUAUUCUGACCCUCUGGCUCUGCGCGAGUUCAAAGAGUUUGCCGCCGGAAGAAGA

[0430] Hence, preferably the RNA construct comprises a sequence substantially as set out in SEQ ID No: 214, or a fragment or variant thereof.

[0431] In one embodiment, the at least one IIP is EV71 3Cpro (B9VUU3; Genome polyprotein Human enterovirus 71), or an orthologue thereof. Lei X, Xiao X, Xue Q, Jin Q, He B, Wang J J. (2013) Cleavage of interferon regulatory factor 7 by enterovirus 71 3C suppresses cellular responses. J Virol, 87, 3, 1690-1698. doi: 10.1128/JVI.01855-12. Epub 2012 Nov. 21.). This IIP is believed to cleave IRF7. One embodiment of the polypeptide sequence of EV71 3Cpro is represented herein as SEQ ID No: 215, as follows:

[SEQ ID No: 215]
GPSLDFALSLLRRNVRQVQTDQGHFTMLGVRDRLAVLPRHSQPGKTIWIEHKLVNVLDAVELVDEQGVNLELTLITLD
TNEKFRDITKFIPENISTASDATLVINTEHMPSMFVPVGDVVQYGFLNLSGKPTHRTMMYNFPTKAGQCGGVVTSVGK
VIGIHIGGNGRQGFCAGLKRSYFASEQ

[0432] Therefore, preferably the RNA construct comprises a nucleotide sequence which encodes an amino acid sequence substantially as set out in SEQ ID No: 215, or a variant or fragment thereof.

[0433] In one embodiment, the EV71 3Cpro polypeptide is encoded by the DNA nucleotide sequence of SEQ ID No: 216, as follows:

[SEQ ID No: 216]
GGCCCGAGCCTTGATTTTGCTCTCTCCCTACTGAGGAGGAACGTCAGGCAAGTCCAAACAGACCAGGGGCATTTCACC
ATGTTGGGTGTTAGGGATCGCTTAGCAGTCCTCCCACGCCACTCACAACCCGGCAAAACTATTTGGATTGAGCACAAA
CTCGTGAACGTCCTTGATGCAGTTGAATTGGTGGATGAGCAAGGAGTCAACCTGGAATTAACCCTCATCACTCTTGAT
ACCAACGAGAAGTTTAGGGATATCACCAAATTCATCCCGGAAAATATTAGCACTGCTAGTGATGCCACCCTAGTGATC
AACACGGAGCACATGCCCTCGATGTTTGTCCCGGTGGGTGACGTTGTGCAGTATGGTTTCCTGAATCTCAGTGGTAAG
CCTACTCATCGCACCATGATGTACAACTTTCCTACTAAGGCAGGGCAATGTGGAGGGGTGGTGACATCAGTTGGAAAA
GTCATCGGTATACACATAGGTGGCAACGGTAGACAAGGATTTTGTGCAGGTCTTAAGAGAAGCTACTTTGCCAGCGAG
CAA

[0434] Accordingly, preferably the EV71 3Cpro polypeptide is encoded by the DNA nucleotide sequence substantially as set out in SEQ ID NO: 216, or a variant or fragment thereof.

[0435] One embodiment of codon optimised nucleic acid (DNA) encoding the EV71 3Cpro polypeptide is provided herein as SEQ ID No: 217, as follows:

[SEQ ID No: 217]
GGCCCTTCTCTGGATTTTGCCCTGAGCCTGCTGCGGAGAAATGTGCGCCAGGTGCAGACAGATCAGGGCCACTTTACA
ATGCTGGGCGTCAGAGACAGACTGGCCGTGCTGCCTAGACACTCTCAGCCTGGCAAGACCATCTGGATCGAGCACAAG
CTGGTCAACGTGCTGGACGCCGTGGAACTGGTTGATGAGCAGGGCGTGAACCTGGAACTGACCCTGATCACCCTGGAC
ACCAACGAGAAGTTCCGGGACATCACCAAGTTCATCCCCGAGAACATCAGCACCGCCAGCGACGCCACACTGGTCATC
AATACCGAGCACATGCCCAGCATGTTCGTGCCTGTGGGAGATGTGGTGCAGTACGGCTTCCTGAACCTGAGCGGCAAG
CCCACACACCGGACCATGATGTACAACTTCCCTACCAAGGCCGGCCAGTGCGGCGGAGTGGTTACATCTGTGGGCAAA
GTGATCGGCATCCACATCGGCGGCAATGGCAGACAGGGATTTTGTGCCGGCCTGAAGAGAAGCTACTTCGCCTCTGAA
CAG

[0436] Hence, preferably the RNA construct is encoded by a DNA sequence substantially as set out in SEQ ID No: 217, or a fragment or variant thereof.

[0437] In an embodiment, the RNA sequence corresponding to the codon optimised DNA sequence of SEQ ID No: 217 is provided herein as SEQ ID No: 218, as follows:

[SEQ ID No: 218]
GGCCCUUCUCUGGAUUUUGCCCUGAGCCUGCUGCGGAGAAAUGUGCGCCAGGUGCAGACAGAUCAGGGCCACUUUACA
AUGCUGGGCGUCAGAGACAGACUGGCCGUGCUGCCUAGACACUCUCAGCCUGGCAAGACCAUCUGGAUCGAGCACAAG
CUGGUCAACGUGCUGGACGCCGUGGAACUGGUUGAUGAGCAGGGCGUGAACCUGGAACUGACCCUGAUCACCCUGGAC
ACCAACGAGAAGUUCCGGGACAUCACCAAGUUCAUCCCCGAGAACAUCAGCACCGCCAGCGACGCCACACUGGUCAUC
AAUACCGAGCACAUGCCCAGCAUGUUCGUGCCUGUGGGAGAUGUGGUGCAGUACGGCUUCCUGAACCUGAGCGGCAAG
CCCACACACCGGACCAUGAUGUACAACUUCCCUACCAAGGCCGGCCAGUGCGGCGGAGUGGUUACAUCUGUGGGCAAA
GUGAUCGGCAUCCACAUCGGCGGCAAUGGCAGACAGGGAUUUUGUGCCGGCCUGAAGAGAAGCUACUUCGCCUCUGAA
CAG

[0438] Hence, preferably the RNA construct comprises a sequence substantially as set out in SEQ ID No: 218, or a fragment or variant thereof.

[0439] In one embodiment, the at least one IIP is FMDV Lpro (P03307; Leader Protease Genome polyprotein foot-and-mouth disease virus (isolate-/Germany/A5Westerwald/1951 serotype A)), or an orthologue thereof. One embodiment of the polypeptide sequence of FMDV Lpro is represented herein as SEQ ID No: 219, as follows:

[SEQ ID No: 219]
MHTTDCFIALVHAIREIRALFLPRTTGKMELTLHNGEKKTFYSRPNNHDNCWLNTILQLFRYVDEPFFDWVYNSPENL
TLEAINQLEELTGLELHEGGPPALVIWNIKHLLHTGIGTASRPSEVCMVDGTDMCLADFHAGIFLKGQEHAVFACVTS
NGWYAIDDEEFYPWTPDPSDVLVFVPYDQEPLNGDWKAMVQRKLK

[0440] Therefore, preferably the RNA construct comprises a nucleotide sequence which encodes an amino acid sequence substantially as set out in SEQ ID No: 219, or a variant or fragment thereof.

[0441] In one embodiment, the FMDV Lpro polypeptide is encoded by the DNA nucleotide sequence of SEQ ID No: 220, as follows:

[SEQ ID No: 220]
ATGCATACAACTGACTGTTTTATCGCTTTGGTGCACGCTATCAGAGAGATCAGAGCACTTTTTCTACCACGAACCACA
GGAAAGATGGAACTCACCCTGCACAACGGCGAGAAAAAGACTTTTTACTCTAGACCCAACAACCACGACAACTGCTGG
TTGAACACCATCCTTCAGTTGTTCAGGTATGTCGATGAACCCTTCTTCGACTGGGTCTACAACTCGCCCGAGAACCTC
ACGCTTGAAGCCATCAACCAATTGGAGGAACTCACAGGACTTGAGTTGCACGAGGGCGGACCGCCTGCCCTTGTGATC
TGGAACATCAAACACTTGCTCCACACCGGCATCGGCACCGCCTCACGACCCAGTGAGGTGTGTATGGTGGACGGCACG
GACATGTGTCTTGCTGACTTCCACGCAGGCATTTTCCTGAAGGGACAGGAACACGCAGTCTTTGCGTGTGTCACCTCC
AACGGGTGGTACGCGATTGACGACGAGGAATTTTACCCCTGGACGCCTGACCCGTCAGACGTCCTGGTGTTTGTCCCG
TACGATCAAGAACCACTCAACGGGGACTGGAAAGCGATGGTTCAGAGGAAGCTTAAG

[0442] Accordingly, preferably the FMDV Lpro polypeptide is encoded by the DNA nucleotide sequence substantially as set out in SEQ ID NO: 220, or a variant or fragment thereof.

[0443] One embodiment of codon optimised nucleic acid (DNA) encoding the FMDV Lpro polypeptide is provided herein as SEQ ID No: 221, as follows:

[SEQ ID No: 221]
ATGCACACCACCGACTGCTTTATCGCCCTGGTGCACGCCATCAGAGAGATCAGAGCCCTGTTCCTGCCTCGGACCACC
GGCAAGATGGAACTGACACTGCACAACGGCGAGAAGAAAACCTTCTACAGCAGACCCAACAACCACGACAACTGCTGG
CTGAACACCATCCTGCAGCTGTTCAGATACGTGGACGAGCCCTTCTTCGACTGGGTGTACAACAGCCCCGAGAATCTG
ACCCTGGAAGCCATCAACCAGCTGGAAGAACTGACCGGCCTGGAACTGCATGAAGGCGGACCTCCAGCTCTGGTCATC
TGGAACATCAAACATCTGCTGCACACCGGCATCGGCACCGCCTCTAGACCATCTGAAGTGTGCATGGTGGACGGCACC
GATATGTGCCTGGCCGATTTTCACGCCGGCATCTTTCTGAAGGGCCAAGAGCATGCCGTGTTCGCCTGCGTGACAAGC
AATGGATGGTACGCCATCGACGACGAGGAATTCTACCCCTGGACACCCGATCCTAGCGACGTGCTGGTGTTCGTGCCC
TACGATCAAGAGCCCCTGAACGGCGATTGGAAGGCCATGGTGCAGCGGAAGCTGAAG

[0444] Hence, preferably the RNA construct is encoded by a DNA sequence substantially as set out in SEQ ID No: 221, or a fragment or variant thereof.

[0445] In an embodiment, the RNA sequence corresponding to the codon optimised DNA sequence of SEQ ID No: 221 is provided herein as SEQ ID No: 222, as follows:

[SEQ ID No: 222]
AUGCACACCACCGACUGCUUUAUCGCCCUGGUGCACGCCAUCAGAGAGAUCAGAGCCCUGUUCCUGCCUCGGACCACC
GGCAAGAUGGAACUGACACUGCACAACGGCGAGAAGAAAACCUUCUACAGCAGACCCAACAACCACGACAACUGCUGG
CUGAACACCAUCCUGCAGCUGUUCAGAUACGUGGACGAGCCCUUCUUCGACUGGGUGUACAACAGCCCCGAGAAUCUG
ACCCUGGAAGCCAUCAACCAGCUGGAAGAACUGACCGGCCUGGAACUGCAUGAAGGCGGACCUCCAGCUCUGGUCAUC
UGGAACAUCAAACAUCUGCUGCACACCGGCAUCGGCACCGCCUCUAGACCAUCUGAAGUGUGCAUGGUGGACGGCACC
GAUAUGUGCCUGGCCGAUUUUCACGCCGGCAUCUUUCUGAAGGGCCAAGAGCAUGCCGUGUUCGCCUGCGUGACAAGC
AAUGGAUGGUACGCCAUCGACGACGAGGAAUUCUACCCCUGGACACCCGAUCCUAGCGACGUGCUGGUGUUCGUGCCC
UACGAUCAAGAGCCCCUGAACGGCGAUUGGAAGGCCAUGGUGCAGCGGAAGCUGAAG

[0446] Hence, preferably the RNA construct comprises a sequence substantially as set out in SEQ ID No: 222, or a fragment or variant thereof.

[0447] In one embodiment, the at least one IIP is FMDV 3Cpro (P03307; Protease 3C Genome polyprotein foot-and-mouth disease virus (isolate-/Germany/A5Westerwald/1951 serotype A), or an orthologue thereof. Ekanayaka P, Shin S H, Weeratunga P, Lee H, Kim T-H, Chathuranga K, Subasinghe A, Park J-H, Lee J-S (2021) Foot and mouth disease virus 3C protease antagonises interferon signaling and C142T substitution attenuates the FMD virus. Front Microbiol., 21, 737031. doi: 10.3389/fmicb.2021.737031

[0448] One embodiment of the polypeptide sequence of FMDV 3Cpro is represented herein as SEQ ID No: 223, as follows:

[SEQ ID No: 223]
SGAPPTDLQKMVMGNTKPVELILDGKTVAICCATGVFGTAYLVPRHLFAEKYDKIMLDGRAMTDSDYRVFEFEIKVKG
QDMLSDAALMVLHRGNRVRDITKHFRDTARMKKGTPVVGVINNADVGRLIFSGEALTYKDIVVCMDGDTMPGLFAYRA
ATKAGYCGGAVLAKDGADTFIVGTHSAGGNGVGYCSCVSRSMLLKMKAHIDPEPHHE

[0449] Therefore, preferably the RNA construct comprises a nucleotide sequence which encodes an amino acid sequence substantially as set out in SEQ ID No: 223, or a variant or fragment thereof.

[0450] In one embodiment, the FMDV 3Cpro polypeptide is encoded by the DNA nucleotide sequence of SEQ ID No: 224, as follows:

[SEQ ID No: 224]
AGTGGTGCCCCCCCGACCGACTTGCAAAAGATGGTCATGGGCAACACAAAGCCTGTTGAGCTCATCCTCGACGGGAAG
ACAGTAGCCATCTGCTGTGCTACTGGAGTGTTTGGCACTGCCTACCTCGTGCCTCGTCATCTTTTCGCTGAGAAGTAT
GACAAGATCATGTTGGACGGCAGAGCCATGACAGACAGTGACTACAGAGTGTTTGAGTTCGAGATCAAAGTAAAAGGA
CAGGACATGCTCTCAGACGCCGCACTCATGGTGCTCCACCGTGGGAACCGCGTGAGAGACATCACGAAGCACTTTCGT
GACACAGCAAGAATGAAGAAAGGCACCCCCGTTGTCGGCGTGATCAACAATGCCGATGTCGGGAGACTGATTTTCTCT
GGCGAAGCCCTTACCTACAAAGACATTGTAGTGTGCATGGACGGAGACACCATGCCCGGGCTTTTTGCCTACAGAGCC
GCCACTAAGGCAGGCTACTGCGGGGGAGCCGTTCTCGCTAAGGACGGGGCTGACACTTTCATCGTTGGCACTCACTCT
GCAGGAGGTAATGGAGTTGGATACTGCTCATGCGTTTCCAGGTCCATGCTTCTCAAGATGAAGGCACACATTGACCCT
GAGCCGCACCACGAG

[0451] Accordingly, preferably the FMDV 3Cpro polypeptide is encoded by the DNA nucleotide sequence substantially as set out in SEQ ID NO: 224, or a variant or fragment thereof.

[0452] One embodiment of codon optimised nucleic acid (DNA) encoding the FMDV 3Cpro polypeptide is provided herein as SEQ ID No: 225, as follows:

[SEQ ID No: 225]
TCTGGTGCCCCTCCTACCGACCTGCAGAAAATGGTCATGGGCAACACCAAGCCTGTGGAACTGATCCTGGACGGCAAG
ACCGTGGCCATCTGTTGTGCAACAGGCGTGTTCGGCACCGCCTACCTGGTTCCTAGACACCTGTTCGCCGAGAAGTAC
GACAAGATCATGCTGGATGGCAGAGCCATGACCGACAGCGACTACCGGGTGTTCGAGTTCGAGATCAAAGTGAAAGGC
CAGGACATGCTGAGCGACGCCGCTCTGATGGTTCTGCACAGAGGCAACAGAGTGCGGGACATCACCAAGCACTTCCGG
GACACCGCCAGAATGAAGAAAGGCACACCTGTCGTGGGCGTGATCAACAACGCTGACGTGGGCAGACTGATCTTCTCT
GGCGAGGCCCTGACCTACAAGGACATCGTCGTGTGCATGGACGGCGACACAATGCCTGGCCTGTTTGCCTATAGAGCC
GCCACAAAGGCCGGCTACTGTGGCGGAGCTGTGCTGGCTAAAGATGGCGCCGATACCTTCATCGTGGGCACACATTCT
GCCGGCGGAAATGGCGTGGGCTACTGCTCTTGTGTGTCCAGATCCATGCTGCTGAAGATGAAGGCCCACATCGACCCC
GAGCCTCACCATGAA

[0453] Hence, preferably the RNA construct is encoded by a DNA sequence substantially as set out in SEQ ID No: 225, or a fragment or variant thereof.

[0454] In an embodiment, the RNA sequence corresponding to the codon optimised DNA sequence of SEQ ID No: 225 is provided herein as SEQ ID No: 226, as follows:

[SEQ ID No: 226]
UCUGGUGCCCCUCCUACCGACCUGCAGAAAAUGGUCAUGGGCAACACCAAGCCUGUGGAACUGAUCCUGGACGGCAAG
ACCGUGGCCAUCUGUUGUGCAACAGGCGUGUUCGGCACCGCCUACCUGGUUCCUAGACACCUGUUCGCCGAGAAGUAC
GACAAGAUCAUGCUGGAUGGCAGAGCCAUGACCGACAGCGACUACCGGGUGUUCGAGUUCGAGAUCAAAGUGAAAGGC
CAGGACAUGCUGAGCGACGCCGCUCUGAUGGUUCUGCACAGAGGCAACAGAGUGCGGGACAUCACCAAGCACUUCCGG
GACACCGCCAGAAUGAAGAAAGGCACACCUGUCGUGGGCGUGAUCAACAACGCUGACGUGGGCAGACUGAUCUUCUCU
GGCGAGGCCCUGACCUACAAGGACAUCGUCGUGUGCAUGGACGGCGACACAAUGCCUGGCCUGUUUGCCUAUAGAGCC
GCCACAAAGGCCGGCUACUGUGGCGGAGCUGUGCUGGCUAAAGAUGGCGCCGAUACCUUCAUCGUGGGCACACAUUCU
GCCGGCGGAAAUGGCGUGGGCUACUGCUCUUGUGUGUCCAGAUCCAUGCUGCUGAAGAUGAAGGCCCACAUCGACCCC
GAGCCUCACCAUGAA

[0455] Hence, preferably the RNA construct comprises a sequence substantially as set out in SEQ ID No: 226, or a fragment or variant thereof.

[0456] In one embodiment, the at least one IIP is Toscana Virus NSS protein (RIG 1 degradation) (P21699; Non-structural protein NS-S Toscana virus), or an orthologue thereof. One embodiment of the polypeptide sequence of Toscana Virus NSS protein is represented herein as SEQ ID No: 227, as follows:

[SEQ ID No: 227]
MQSRAVILKYRSGSGHKRSLPRFYIDCDLDTFDFEKDCSLIENEFPIYINNYKVVYKSKPTLSHFLIEKEFPAVLGPG
MISAVRTRLYEPTMRELYQESIHQLKRSNKKYLLSALRWPTGIPTLEFTDYYFEELLFLSEFDPGSIQRYLKLLVKAS
GLYNSTNEEQIVEIHRRVLIEGKKHGLTAFDLPGNDILGDICVVQAARVTRLVAKTFSKMTRDTHLMIYFSISPVELV
LSKLDKKGDKRAKAKGLMSMSAARSYDYFMRTDLGFRETALSTFWAKDWPTPQETILSDKRCLKEDMRVTKWLPSPPH
YPPL

[0457] Therefore, preferably the RNA construct comprises a nucleotide sequence which encodes an amino acid sequence substantially as set out in SEQ ID No: 227, or a variant or fragment thereof.

[0458] In one embodiment, the Toscana Virus NSS polypeptide is encoded by the DNA nucleotide sequence of SEQ ID No: 228, as follows:

[SEQ ID No: 228]
ATGCAATCCAGAGCTGTCATCTTGAAGTATAGATCTGGTTCAGGCCACAAGAGGTCTTTGCCCAGGTTCTACATAGAC
TGTGATTTGGACACCTTTGATTTTGAGAAGGATTGCTCTCTGATTGAGAATGAGTTCCCCATTTACATAAACAATTAT
AAGGTGGTCTATAAGTCAAAGCCAACTCTCTCACATTTCCTCATTGAGAAGGAGTTTCCTGCTGTGCTGGGGCCTGGT
ATGATCAGTGCAGTTCGAACCAGACTTTACGAGCCAACTATGAGAGAGCTCTACCAGGAATCGATTCACCAACTAAAG
AGGAGCAACAAGAAATACCTTTTGTCTGCTCTCAGGTGGCCCACAGGGATTCCTACTCTAGAGTTTATAGACTATTAC
TTCGAGGAGCTCCTGTTCTTGTCAGAGTTTGACCCGGGGTCTATCCAGAGATACCTGAAATTACTGGTTAAGGCCTCT
GGGCTTTACAACTCCACTAATGAGGAGCAGATAGTGGAGATTCACAGACGAGTGCTCATAGAAGGCAAAAAGCACGGA
TTGACTGCTTTTGATCTCCCAGGAAATGACATCCTTGGAGACATCTGTGTGGTCCAAGCAGCACGGGTGACAAGACTG
GTTGCTAAGACATTCTCTAAGATGACCAGAGACACCCATCTGATGATATACTTCTCGATAAGCCCAGTTGAGTTGGTT
TTGAGTAAACTTGATAAGAAAGGGGACAAGAGGGCTAAAGCAAAAGGGTTGATGTCTATGAGTGCCGCTAGGTCTTAT
GACTATTTTATGAGAACTGACTTGGGATTCAGAGAGACTGCTCTTTCCACCTTTTGGGCTAAGGACTGGCCTACCCCA
CAAGAGACCATTCTATCTGACAAACGATGCCTTAAAGAAGACATGAGAGTGACAAAGTGGCTGCCTAGTCCCCCCCAC
TACCCACCCTTA

[0459] Accordingly, preferably the Toscana Virus NSS polypeptide is encoded by the DNA nucleotide sequence substantially as set out in SEQ ID NO: 228, or a variant or fragment thereof.

[0460] One embodiment of codon optimised nucleic acid (DNA) encoding the Toscana Virus NSS polypeptide is provided herein as SEQ ID No: 229, as follows:

[SEQ ID No: 229]
ATGCAGAGCAGAGCCGTGATCCTGAAGTACAGAAGCGGCAGCGGCCACAAGAGAAGCCTGCCTAGATTCTACATCGAC
TGCGACCTGGACACCTTCGACTTCGAGAAGGACTGCAGCCTGATCGAGAACGAGTTCCCCATCTACATCAACAACTAC
AAGGTGGTGTACAAGAGCAAGCCAACTCTGAGCCACTTCCTCATCGAGAAAGAATTCCCTGCCGTGCTCGGCCCTGGC
ATGATCTCTGCCGTTAGAACCAGACTGTACGAGCCCACCATGAGAGAGCTGTACCAAGAGAGCATCCACCAGCTGAAG
CGGAGCAACAAGAAGTACCTGCTGAGCGCCCTGAGATGGCCCACAGGCATTCCCACACTGGAATTCATCGACTACTAC
TTCGAGGAACTGCTGTTCCTGAGCGAGTTCGACCCTGGCAGCATCCAGAGATACCTGAAGCTGCTGGTCAAGGCCAGC
GGCCTGTACAACAGCACCAACGAGGAACAGATCGTGGAAATCCACCGGCGGGTGCTGATCGAGGGAAAGAAGCACGGA
CTGACCGCCTTCGACCTGCCTGGCAATGATATCCTGGGCGACATCTGCGTGGTGCAGGCCGCTAGAGTGACAAGACTG
GTGGCCAAGACCTTCAGCAAGATGACCAGAGACACCCACCTGATGATCTACTTCAGCATCAGCCCCGTGGAACTGGTG
CTGAGCAAGCTGGACAAGAAGGGCGACAAGAGAGCCAAGGCCAAGGGCCTGATGAGCATGTCTGCCGCCAGATCCTAC
GACTACTTCATGAGAACCGACCTGGGCTTCAGAGAGACAGCCCTGAGCACCTTCTGGGCCAAAGACTGGCCCACACCT
CAAGAGACAATCCTGTCCGACAAGCGGTGCCTGAAAGAAGATATGCGGGTCACCAAGTGGCTGCCCTCTCCACCTCAT
TACCCTCCACTT

[0461] Hence, preferably the RNA construct is encoded by a DNA sequence substantially as set out in SEQ ID No: 229, or a fragment or variant thereof.

[0462] In an embodiment, the RNA sequence corresponding to the codon optimised DNA sequence of SEQ ID No: 229 is provided herein as SEQ ID No: 230, as follows:

[SEQ ID No: 230]
AUGCAGAGCAGAGCCGUGAUCCUGAAGUACAGAAGCGGCAGCGGCCACAAGAGAAGCCUGCCUAGAUUCUACAUCGAC
UGCGACCUGGACACCUUCGACUUCGAGAAGGACUGCAGCCUGAUCGAGAACGAGUUCCCCAUCUACAUCAACAACUAC
AAGGUGGUGUACAAGAGCAAGCCAACUCUGAGCCACUUCCUCAUCGAGAAAGAAUUCCCUGCCGUGCUCGGCCCUGGC
AUGAUCUCUGCCGUUAGAACCAGACUGUACGAGCCCACCAUGAGAGAGCUGUACCAAGAGAGCAUCCACCAGCUGAAG
CGGAGCAACAAGAAGUACCUGCUGAGCGCCCUGAGAUGGCCCACAGGCAUUCCCACACUGGAAUUCAUCGACUACUAC
UUCGAGGAACUGCUGUUCCUGAGCGAGUUCGACCCUGGCAGCAUCCAGAGAUACCUGAAGCUGCUGGUCAAGGCCAGC
GGCCUGUACAACAGCACCAACGAGGAACAGAUCGUGGAAAUCCACCGGCGGGUGCUGAUCGAGGGAAAGAAGCACGGA
CUGACCGCCUUCGACCUGCCUGGCAAUGAUAUCCUGGGCGACAUCUGCGUGGUGCAGGCCGCUAGAGUGACAAGACUG
GUGGCCAAGACCUUCAGCAAGAUGACCAGAGACACCCACCUGAUGAUCUACUUCAGCAUCAGCCCCGUGGAACUGGUG
CUGAGCAAGCUGGACAAGAAGGGCGACAAGAGAGCCAAGGCCAAGGGCCUGAUGAGCAUGUCUGCCGCCAGAUCCUAC
GACUACUUCAUGAGAACCGACCUGGGCUUCAGAGAGACAGCCCUGAGCACCUUCUGGGCCAAAGACUGGCCCACACCU
CAAGAGACAAUCCUGUCCGACAAGCGGUGCCUGAAAGAAGAUAUGCGGGUCACCAAGUGGCUGCCCUCUCCACCUCAU
UACCCUCCACUU

[0463] Hence, preferably the RNA construct comprises a sequence substantially as set out in SEQ ID No: 230, or a fragment or variant thereof.

[0464] In one embodiment, the at least one IIP is Non-structural protein 1 Influenza A virus (strain A/Puerto Rico/8/1934 H1N1) (P03496; Influenza A/PR/8/34 NS1), or an orthologue thereof. One embodiment of the polypeptide sequence of Influenza A virus Non-structural protein 1 is represented herein as SEQ ID No: 231, as follows:

[SEQ ID No: 231]
MDPNTVSSFQVDCFLWHVRKRVADQELGDAPFLDRLRRDQKSLRGRGSTLGLDIETATRAGKQIVERILKEESDEALK
MTMASVPASRYLTDMTLEEMSREWSMLIPKQKVAGPLCIRMDQAIMDKNIILKANFSVIFDRLETLILLRAFTEEGAI
VGEISPLPSLPGHTAEDVKNAVGVLIGGLEWNDNTVRVSETLQRFAWRSSNENGRPPLTPKQKREMAGTIRSEV

[0465] Therefore, preferably the RNA construct comprises a nucleotide sequence which encodes an amino acid sequence substantially as set out in SEQ ID No: 231, or a variant or fragment thereof.

[0466] In one embodiment, the Non-structural protein 1 Influenza A virus polypeptide is encoded by the DNA nucleotide sequence of SEQ ID No: 232, as follows:

[SEQ ID No: 232]
ATGGATCCAAACACTGTGTCAAGCTTTCAGGTAGATTGCTTTCTTTGGCATGTCCGCAAACGAGTTGCAGACCAAGAA
CTAGGTGATGCCCCATTCCTTGATCGGCTTCGCCGAGATCAGAAATCCCTAAGAGGAAGGGGCAGCACTCTTGGTCTG
GACATCGAGACAGCCACACGTGCTGGAAAGCAGATAGTGGAGCGGATTCTGAAAGAAGAATCCGATGAGGCACTTAAA
ATGACCATGGCCTCTGTACCTGCGTCGCGTTACCTAACCGACATGACTCTTGAGGAAATGTCAAGGGAATGGTCCATG
CTCATACCCAAGCAGAAAGTGGCAGGCCCTCTTTGTATCAGAATGGACCAGGCGATCATGGATAAAAACATCATACTG
AAAGCGAACTTCAGTGTGATTTTTGACCGGCTGGAGACTCTAATATTGCTAAGGGCTTTCACCGAAGAGGGAGCAATT
GTTGGCGAAATTTCACCATTGCCTTCTCTTCCAGGACATACTGCTGAGGATGTCAAAAATGCAGTTGGAGTCCTCATC
GGAGGACTTGAATGGAATGATAACACAGTTCGAGTCTCTGAAACTCTACAGAGATTCGCTTGGAGAAGCAGTAATGAG
AATGGGAGACCTCCACTCACTCCAAAACAGAAACGAGAAATGGCGGGAACAATTAGGTCAGAAGTTTGA

[0467] Accordingly, preferably the Non-structural protein 1 Influenza A virus polypeptide is encoded by the DNA nucleotide sequence substantially as set out in SEQ ID NO: 232, or a variant or fragment thereof.

[0468] One embodiment of codon optimised nucleic acid (DNA) encoding the Non-structural protein 1 Influenza A virus polypeptide is provided herein as SEQ ID No: 233, as follows:

[SEQ ID No: 233]
ATGGACCCCAATACCGTCAGCAGCTTCCAGGTGGACTGCTTCCTGTGGCACGTGCGGAAAAGAGTGGCCGATCAAGAA
CTGGGCGACGCCCCATTCCTGGACAGACTGAGAAGAGATCAGAAGTCCCTGAGAGGCAGAGGCAGCACACTGGGCCTC
GACATTGAGACAGCCACAAGAGCCGGCAAGCAGATCGTGGAACGGATCCTGAAAGAGGAAAGCGACGAGGCCCTGAAG
ATGACCATGGCCTCTGTGCCTGCCAGCAGATACCTGACCGACATGACCCTGGAAGAGATGAGCCGCGAGTGGTCCATG
CTGATCCCCAAGCAGAAAGTGGCCGGACCTCTGTGCATCAGAATGGATCAGGCCATCATGGACAAGAACATCATCCTG
AAGGCCAACTTCAGCGTGATCTTCGACCGGCTGGAAACCCTGATCCTGCTGAGAGCCTTTACCGAAGAGGGCGCCATC
GTGGGAGAGATCAGTCCTCTGCCTTCTCTGCCTGGACACACCGCCGAGGATGTGAAGAATGCTGTGGGCGTGCTGATC
GGCGGCCTGGAATGGAACGATAACACCGTCAGAGTGTCCGAGACACTGCAGAGATTTGCCTGGCGGAGCAGCAACGAG
AACGGCAGACCTCCTCTGACACCTAAGCAGAAAAGAGAGATGGCCGGCACCATCCGCAGCGAAGTGTAA

[0469] Hence, preferably the RNA construct is encoded by a DNA sequence substantially as set out in SEQ ID No: 233, or a fragment or variant thereof.

[0470] In an embodiment, the RNA sequence corresponding to the codon optimised DNA sequence of SEQ ID No: 233 is provided herein as SEQ ID No: 234, as follows:

[SEQ ID No: 234]
AUGGACCCCAAUACCGUCAGCAGCUUCCAGGUGGACUGCUUCCUGUGGCACGUGCGGAAAAGAGUGGCCGAUCAAGAA
CUGGGCGACGCCCCAUUCCUGGACAGACUGAGAAGAGAUCAGAAGUCCCUGAGAGGCAGAGGCAGCACACUGGGCCUC
GACAUUGAGACAGCCACAAGAGCCGGCAAGCAGAUCGUGGAACGGAUCCUGAAAGAGGAAAGCGACGAGGCCCUGAAG
AUGACCAUGGCCUCUGUGCCUGCCAGCAGAUACCUGACCGACAUGACCCUGGAAGAGAUGAGCCGCGAGUGGUCCAUG
CUGAUCCCCAAGCAGAAAGUGGCCGGACCUCUGUGCAUCAGAAUGGAUCAGGCCAUCAUGGACAAGAACAUCAUCCUG
AAGGCCAACUUCAGCGUGAUCUUCGACCGGCUGGAAACCCUGAUCCUGCUGAGAGCCUUUACCGAAGAGGGCGCCAUC
GUGGGAGAGAUCAGUCCUCUGCCUUCUCUGCCUGGACACACCGCCGAGGAUGUGAAGAAUGCUGUGGGCGUGCUGAUC
GGCGGCCUGGAAUGGAACGAUAACACCGUCAGAGUGUCCGAGACACUGCAGAGAUUUGCCUGGCGGAGCAGCAACGAG
AACGGCAGACCUCCUCUGACACCUAAGCAGAAAAGAGAGAUGGCCGGCACCAUCCGCAGCGAAGUGUAA

[0471] Hence, preferably the RNA construct comprises a sequence substantially as set out in SEQ ID No: 234, or a fragment or variant thereof.

[0472] In one embodiment, the at least one IIP is SARS CoV N protein (P59595; Nucleoprotein Severe acute respiratory syndrome coronavirus), or an orthologue thereof. One embodiment of the polypeptide sequence of SARS CoV N protein is represented herein as SEQ ID No: 235, as follows:

[SEQ ID No: 235]
MSDNGPQSNQRSAPRITFGGPTDSTDNNQNGGRNGARPKQRRPQGLPNNTASWFTALTQHGKEELRFPRGQGVPINTN
SGPDDQIGYYRRATRRVRGGDGKMKELSPRWYFYYLGTGPEASLPYGANKEGIVWVATEGALNTPKDHIGTRNPNNNA
ATVLOLPQGTTLPKGFYAEGSRGGSQASSRSSSRSRGNSRNSTPGSSRGNSPARMASGGGETALALLLLDRLNQLESK
VSGKGQQQQGQTVTKKSAAEASKKPRQKRTATKQYNVTQAFGRRGPEQTQGNFGDQDLIRQGTDYKHWPQIAQFAPSA
SAFFGMSRIGMEVTPSGTWLTYHGAIKLDDKDPQFKDNVILLNKHIDAYKTFPPTEPKKDKKKKTDEAQPLPQRQKKQ
PTVTLLPAADMDDFSRQLQNSMSGASADSTQA

[0473] Therefore, preferably the RNA construct comprises a nucleotide sequence which encodes an amino acid sequence substantially as set out in SEQ ID No: 235, or a variant or fragment thereof.

[0474] In one embodiment, the SARS CoV N polypeptide is encoded by the DNA nucleotide sequence of SEQ ID No: 236, as follows:

[SEQ ID No: 236]
ATGTCTGATAATGGACCCCAATCAAACCAACGTAGTGCCCCCCGCATTACATTTGGTGGACCCACAGATTCAACTGAC
AATAACCAGAATGGAGGACGCAATGGGGCAAGGCCAAAACAGCGCCGACCCCAAGGTTTACCCAATAATACTGCGTCT
TGGTTCACAGCTCTCACTCAGCATGGCAAGGAGGAACTTAGATTCCCTCGAGGCCAGGGCGTTCCAATCAACACCAAT
AGTGGTCCAGATGACCAAATTGGCTACTACCGAAGAGCTACCCGACGAGTTCGTGGTGGTGACGGCAAAATGAAAGAG
ATCGTATGGGTTGCAACTGAGGGAGCCTTGAATACACCCAAAGACCACATTGGCACCCGCAATCCTAATAACAATGCT
GCCACCGTGCTACAACTTCCTCAAGGAACAACATTGCCAAAAGGCTTCTACGCAGAGGGAAGCAGAGGCGGCAGTCAA
GCCTCTTCTCGCTCCTCATCACGTAGTCGCGGTAATTCAAGAAATTCAACTCCTGGCAGCAGTAGGGGAAATTCTCCT
GCTCGAATGGCTAGCGGAGGTGGTGAAACTGCCCTCGCGCTATTGCTGCTAGACAGATTGAACCAGCTTGAGAGCAAA
GTTTCTGGTAAAGGCCAACAACAACAAGGCCAAACTGTCACTAAGAAATCTGCTGCTGAGGCATCTAAAAAGCCTCGC
CAAAAACGTACTGCCACAAAACAGTACAACGTCACTCAAGCATTTGGGAGACGTGGTCCAGAACAAACCCAAGGAAAT
TTCGGGGACCAAGACCTAATCAGACAAGGAACTGATTACAAACATTGGCCGCAAATTGCACAATTTGCTCCAAGTGCC
TCTGCATTCTTTGGAATGTCACGCATTGGCATGGAAGTCACACCTTCGGGAACATGGCTGACTTATCATGGAGCCATT
AAATTGGATGACAAAGATCCACAATTCAAAGACAACGTCATACTGCTGAACAAGCACATTGACGCATACAAAACATTC
CCACCAACAGAGCCTAAAAAGGACAAAAAGAAAAAGACTGATGAAGCTCAGCCTTTGCCGCAGAGACAAAAGAAGCAG
CCCACTGTGACTCTTCTTCCTGCGGCTGACATGGATGATTTCTCCAGACAACTTCAAAATTCCATGAGTGGAGCTTCT
GCTGATTCAACTCAGGCA

[0475] Accordingly, preferably the SARS CoV N polypeptide is encoded by the DNA nucleotide sequence substantially as set out in SEQ ID NO: 236, or a variant or fragment thereof.

[0476] One embodiment of codon optimised nucleic acid (DNA) encoding the SARS CoV N polypeptide is provided herein as SEQ ID No: 237, as follows:

[SEQ ID No: 237]
ATGAGCGACAATGGCCCTCAGAGCAACCAGAGAAGCGCCCCTAGAATCACCTTTGGCGGCCCTACCGACAGCACCGAC
AACAACCAGAACGGCGGCAGAAATGGCGCCAGACCTAAGCAGAGAAGGCCTCAGGGCCTGCCTAACAATACCGCCAGC
TGGTTCACAGCCCTGACACAGCACGGCAAAGAGGAACTGAGATTCCCCAGAGGACAGGGCGTGCCCATCAACACAAAT
AGCGGCCCTGACGACCAGATCGGCTACTACAGACGGGCCACCAGAAGAGTTAGAGGCGGCGACGGCAAGATGAAGGAA
CTGTCCCCTCGGTGGTACTTCTACTACCTCGGCACAGGACCCGAAGCCAGCCTTCCTTATGGCGCCAACAAAGAGGGC
ATCGTCTGGGTTGCAACAGAAGGCGCCCTGAACACCCCTAAGGACCACATCGGCACCAGAAATCCCAACAACAACGCC
GCCACAGTGCTGCAGTTGCCACAGGGAACAACACTGCCCAAGGGCTTCTACGCCGAGGGATCTAGAGGCGGATCTCAG
GCCAGCAGCAGAAGCAGCTCTAGAAGCAGAGGCAACAGCCGGAATAGCACCCCTGGCAGCTCCAGAGGCAATTCCCCT
GCCAGAATGGCTTCTGGCGGCGGAGAAACAGCTCTGGCACTGCTGCTGCTCGACCGGCTGAATCAGCTGGAATCTAAG
GTGTCCGGCAAGGGCCAGCAACAGCAGGGACAGACCGTGACCAAGAAGTCTGCCGCTGAGGCCAGCAAGAAGCCCAGA
CAGAAGAGAACCGCCACCAAGCAGTACAACGTGACCCAGGCCTTTGGCAGAAGAGGCCCAGAACAGACCCAGGGCAAT
TTCGGCGACCAGGACCTGATCAGACAGGGCACCGATTACAAGCACTGGCCCCAGATCGCCCAGTTTGCCCCTTCTGCC
TCTGCCTTTTTCGGCATGAGCCGGATCGGCATGGAAGTGACACCTAGCGGCACCTGGCTGACATATCACGGCGCCATC
AAGCTGGACGACAAGGACCCTCAGTTCAAGGACAACGTGATCCTGCTGAACAAGCACATCGACGCCTACAAGACATTC
CCTCCAACCGAGCCTAAGAAGGACAAGAAGAAGAAAACCGACGAGGCCCAGCCTCTGCCACAGAGACAGAAAAAGCAG
CCCACCGTGACACTGCTGCCTGCCGCCGATATGGACGACTTCTCTAGACAGCTGCAGAACAGCATGAGCGGCGCCAGC
GCTGATTCTACACAAGCT

[0477] Hence, preferably the RNA construct is encoded by a DNA sequence substantially as set out in SEQ ID No: 237, or a fragment or variant thereof.

[0478] In an embodiment, the RNA sequence corresponding to the codon optimised DNA sequence of SEQ ID No: 237 is provided herein as SEQ ID No: 238, as follows:

[SEQ ID No: 238]
AUGAGCGACAAUGGCCCUCAGAGCAACCAGAGAAGCGCCCCUAGAAUCACCUUUGGCGGCCCUACCGACAGCACCGAC
AACAACCAGAACGGCGGCAGAAAUGGCGCCAGACCUAAGCAGAGAAGGCCUCAGGGCCUGCCUAACAAUACCGCCAGC
UGGUUCACAGCCCUGACACAGCACGGCAAAGAGGAACUGAGAUUCCCCAGAGGACAGGGCGUGCCCAUCAACACAAAU
AGCGGCCCUGACGACCAGAUCGGCUACUACAGACGGGCCACCAGAAGAGUUAGAGGCGGCGACGGCAAGAUGAAGGAA
CUGUCCCCUCGGUGGUACUUCUACUACCUCGGCACAGGACCCGAAGCCAGCCUUCCUUAUGGCGCCAACAAAGAGGGC
AUCGUCUGGGUUGCAACAGAAGGCGCCCUGAACACCCCUAAGGACCACAUCGGCACCAGAAAUCCCAACAACAACGCC
GCCACAGUGCUGCAGUUGCCACAGGGAACAACACUGCCCAAGGGCUUCUACGCCGAGGGAUCUAGAGGCGGAUCUCAG
GCCAGCAGCAGAAGCAGCUCUAGAAGCAGAGGCAACAGCCGGAAUAGCACCCCUGGCAGCUCCAGAGGCAAUUCCCCU
GCCAGAAUGGCUUCUGGCGGCGGAGAAACAGCUCUGGCACUGCUGCUGCUCGACCGGCUGAAUCAGCUGGAAUCUAAG
GUGUCCGGCAAGGGCCAGCAACAGCAGGGACAGACCGUGACCAAGAAGUCUGCCGCUGAGGCCAGCAAGAAGCCCAGA
CAGAAGAGAACCGCCACCAAGCAGUACAACGUGACCCAGGCCUUUGGCAGAAGAGGCCCAGAACAGACCCAGGGCAAU
UUCGGCGACCAGGACCUGAUCAGACAGGGCACCGAUUACAAGCACUGGCCCCAGAUCGCCCAGUUUGCCCCUUCUGCC
UCUGCCUUUUUCGGCAUGAGCCGGAUCGGCAUGGAAGUGACACCUAGCGGCACCUGGCUGACAUAUCACGGCGCCAUC
AAGCUGGACGACAAGGACCCUCAGUUCAAGGACAACGUGAUCCUGCUGAACAAGCACAUCGACGCCUACAAGACAUUC
CCUCCAACCGAGCCUAAGAAGGACAAGAAGAAGAAAACCGACGAGGCCCAGCCUCUGCCACAGAGACAGAAAAAGCAG
CCCACCGUGACACUGCUGCCUGCCGCCGAUAUGGACGACUUCUCUAGACAGCUGCAGAACAGCAUGAGCGGCGCCAGC
GCUGAUUCUACACAAGCU

[0479] Hence, preferably the RNA construct comprises a sequence substantially as set out in SEQ ID No: 238, or a fragment or variant thereof.

[0480] In one embodiment, the at least one IIP is MHV N protein (P03416; Nucleoprotein Murine coronavirus (strain A59)), or an orthologue thereof. One embodiment of the polypeptide sequence of MHV N protein is represented herein as SEQ ID No: 239, as so follows:

[SEQ ID No: 239]
MSFVPGQENAGGRSSSVNRAGNGILKKTTWADQTERGPNNQNRGRRNQPKQTATTQPNSGSVVPHYSWFSGITQFQKG
KEFQFAEGQGVPIANGIPASEQKGYWYRHNRRSFKTPDGQQKQLLPRWYFYYLGTGPHAGASYGDSIEGVFWVANSQA
DTNTRSDIVERDPSSHEAIPTRFAPGTVLPQGFYVEGSGRSAPASRSGSRSQSRGPNNRARSSSNQRQPASTVKPDMA
EEIAALVLAKLGKDAGQPKQVTKQSAKEVROKILNKPRQKRTPNKQCPVQQCFGKRGPNQNFGGSEMLKLGTSDPQFP
ILAELAPTVGAFFFGSKLELVKKNSGGADEPTKDVYELQYSGAVRFDSTLPGFETIMKVLNENLNAYQKDGGADVVSP
KPQRKGRRQAQEKKDEVDNVSVAKPKSSVQRNVSRELTPEDRSLLAQILDDGVVPDGLEDDSNV

[0481] Therefore, preferably the RNA construct comprises a nucleotide sequence which encodes an amino acid sequence substantially as set out in SEQ ID No: 239, or a variant or fragment thereof.

[0482] In one embodiment, the MHV N polypeptide is encoded by the DNA nucleotide sequence of SEQ ID No: 240, as follows:

[SEQ ID No: 240]
ATGTCTTTTGTTCCTGGGCAAGAAAATGCCGGTGGCAGAAGCTCCTCTGTAAACCGCGCTGGTAATGGAATCCTCAAG
AAGACCACTTGGGCTGACCAAACCGAGCGTGGACCAAATAATCAAAATAGAGGCAGAAGGAATCAGCCAAAGCAGACT
GCAACTACTCAACCCAACTCCGGGAGTGTGGTTCCCCATTACTCCTGGTTTTCTGGCATTACCCAGTTCCAAAAGGGA
AAGGAGTTTCAGTTTGCAGAAGGACAAGGAGTGCCTATTGCCAATGGAATCCCCGCTTCAGAGCAAAAGGGATATTGG
TATAGACACAACCGCCGTTCTTTTAAAACACCTGATGGGCAGCAGAAGCAATTACTGCCCAGATGGTATTTTTACTAT
CTTGGCACAGGGCCCCATGCTGGAGCCAGTTATGGAGACAGCATTGAAGGTGTCTTCTGGGTTGCAAACAGCCAAGCG
GACACCAATACCCGCTCTGATATTGTCGAAAGGGACCCAAGCAGTCATGAGGCTATTCCTACTAGGTTTGCGCCCGGC
ACGGTATTGCCTCAGGGCTTTTATGTTGAAGGCTCTGGAAGGTCTGCACCTGCTAGCCGATCTGGTTCGCGGTCACAA
TCCCGTGGGCCAAATAATCGCGCTAGAAGCAGTTCCAACCAGCGCCAGCCTGCCTCTACTGTAAAACCTGATATGGCC
GAAGAAATTGCTGCTCTTGTTTTGGCTAAGCTCGGTAAAGATGCCGGCCAGCCCAAGCAAGTAACGAAGCAAAGTGCC
AAAGAAGTCAGGCAGAAAATTTTAAACAAGCCTCGCCAAAAGAGGACTCCAAACAAGCAGTGCCCAGTGCAGCAGTGT
TTTGGAAAGAGAGGCCCCAATCAGAATTTTGGAGGCTCTGAAATGTTAAAACTTGGAACTAGTGATCCACAGTTCCCC
ATTCTTGCAGAGTTGGCTCCAACAGTTGGTGCCTTCTTCTTTGGATCTAAATTAGAATTGGTCAAAAAGAATTCTGGT
GGTGCTGATGAACCCACCAAAGATGTGTATGAGCTGCAATATTCAGGTGCAGTTAGATTTGATAGTACTCTACCTGGT
TTTGAGACTATCATGAAAGTGTTGAATGAGAATTTGAATGCCTACCAGAAGGATGGTGGTGCAGATGTGGTGAGCCCA
AAGCCCCAAAGAAAAGGGCGTAGACAGGCTCAGGAAAAGAAAGATGAAGTAGATAATGTAAGCGTTGCAAAGCCCAAA
AGCTCTGTGCAGCGAAATGTAAGTAGAGAATTAACCCCAGAGGATAGAAGTCTGTTGGCTCAGATCCTTGATGATGGC
GTAGTGCCAGATGGGTTAGAAGATGACTCTAATGTG

[0483] Accordingly, preferably the MHV N polypeptide is encoded by the DNA nucleotide sequence substantially as set out in SEQ ID NO: 240, or a variant or fragment thereof.

[0484] One embodiment of codon optimised nucleic acid (DNA) encoding the MHV N polypeptide is provided herein as SEQ ID No: 241, as follows:

ATGAGCTTCGTGCCCGGCCAAGAAAATGCCGGCGGAAGATCTAGCAGCGTGAACAGAGCCGGCAACGGCATCCTGAAG
AAAACCACCTGGGCCGACCAGACCGAGAGAGGCCCCAACAACCAGAACCGGGGCAGAAGAAACCAGCCTAAGCAGACC
GCCACCACACAGCCTAATAGCGGCTCTGTGGTGCCCCACTACAGCTGGTTTAGCGGCATCACCCAGTTCCAGAAGGGC
AAAGAGTTCCAGTTCGCCGAAGGACAGGGCGTGCCAATCGCCAATGGAATCCCTGCCTCTGAGCAGAAAGGCTACTGG
TACAGACACAACCGGCGGAGCTTCAAGACCCCTGATGGACAGCAGAAACAGCTGCTGCCCAGATGGTACTTCTACTAC
CTCGGCACAGGACCTCACGCAGGCGCCTCTTATGGCGATTCTATCGAGGGCGTGTTCTGGGTCGCCAACAGCCAGGCC
GATACCAACACCAGATCCGACATCGTGGAACGGGACCCTAGCAGCCACGAGGCCATTCCTACAAGATTTGCCCCTGGC
ACCGTGCTGCCTCAGGGCTTTTATGTGGAAGGCAGCGGAAGAAGCGCCCCTGCCAGTAGATCTGGCAGCAGATCTCAG
AGCAGGGGCCCTAACAACAGAGCCAGAAGCAGCAGCAACCAGAGACAGCCTGCCAGCACCGTGAAGCCCGATATGGCC
GAAGAAATCGCCGCTCTGGTGCTGGCCAAGCTGGGAAAAGATGCCGGCCAGCCAAAGCAAGTGACCAAGCAGAGCGCC
AAAGAAGTGCGGCAGAAGATCCTGAACAAGCCCCGGCAGAAGCGGACCCCTAACAAGCAGTGTCCTGTGCAGCAGTGC
TTCGGCAAGAGGGGCCCCAATCAGAATTTTGGCGGCAGCGAGATGCTGAAGCTGGGCACAAGCGATCCTCAGTTCCCT
ATCCTGGCCGAGCTGGCTCCTACAGTGGGCGCATTTTTCTTTGGCTCCAAACTCGAGCTGGTCAAGAAGAACAGCGGC
GGAGCCGATGAGCCCACCAAGGATGTGTACGAGCTGCAGTACTCTGGCGCCGTCAGATTCGATAGCACCCTGCCTGGC
TTCGAGACAATCATGAAGGTGCTGAACGAGAACCTGAACGCCTACCAGAAGGATGGCGGCGCTGACGTGGTGTCTCCT
AAGCCTCAGAGAAAAGGCAGACGGCAGGCCCAAGAGAAGAAAGACGAGGTGGACAACGTGTCCGTGGCCAAGCCTAAG

[SEQ ID No: 241]
AGCAGCGTGCAGAGAAACGTGTCCAGAGAGCTGACCCCAGAGGACAGATCTCTGCTGGCTCAGATCCTGGACGATGGC
GTGGTGCCAGATGGCCTGGAAGATGACAGCAACGTG

[0485] Hence, preferably the RNA construct is encoded by a DNA sequence substantially as set out in SEQ ID No: 241, or a fragment or variant thereof.

[0486] In an embodiment, the RNA sequence corresponding to the codon optimised DNA sequence of SEQ ID No: 241 is provided herein as SEQ ID No: 242, as follows:

[SEQ ID No: 242]
AUGAGCUUCGUGCCCGGCCAAGAAAAUGCCGGCGGAAGAUCUAGCAGCGUGAACAGAGCCGGCAACGGCAUCCUGAAG
AAAACCACCUGGGCCGACCAGACCGAGAGAGGCCCCAACAACCAGAACCGGGGCAGAAGAAACCAGCCUAAGCAGACC
GCCACCACACAGCCUAAUAGCGGCUCUGUGGUGCCCCACUACAGCUGGUUUAGCGGCAUCACCCAGUUCCAGAAGGGC
AAAGAGUUCCAGUUCGCCGAAGGACAGGGCGUGCCAAUCGCCAAUGGAAUCCCUGCCUCUGAGCAGAAAGGCUACUGG
UACAGACACAACCGGCGGAGCUUCAAGACCCCUGAUGGACAGCAGAAACAGCUGCUGCCCAGAUGGUACUUCUACUAC
CUCGGCACAGGACCUCACGCAGGCGCCUCUUAUGGCGAUUCUAUCGAGGGCGUGUUCUGGGUCGCCAACAGCCAGGCC
GAUACCAACACCAGAUCCGACAUCGUGGAACGGGACCCUAGCAGCCACGAGGCCAUUCCUACAAGAUUUGCCCCUGGC
ACCGUGCUGCCUCAGGGCUUUUAUGUGGAAGGCAGCGGAAGAAGCGCCCCUGCCAGUAGAUCUGGCAGCAGAUCUCAG
AGCAGGGGCCCUAACAACAGAGCCAGAAGCAGCAGCAACCAGAGACAGCCUGCCAGCACCGUGAAGCCCGAUAUGGCC
GAAGAAAUCGCCGCUCUGGUGCUGGCCAAGCUGGGAAAAGAUGCCGGCCAGCCAAAGCAAGUGACCAAGCAGAGCGCC
AAAGAAGUGCGGCAGAAGAUCCUGAACAAGCCCCGGCAGAAGCGGACCCCUAACAAGCAGUGUCCUGUGCAGCAGUGC
UUCGGCAAGAGGGGCCCCAAUCAGAAUUUUGGCGGCAGCGAGAUGCUGAAGCUGGGCACAAGCGAUCCUCAGUUCCCU
AUCCUGGCCGAGCUGGCUCCUACAGUGGGCGCAUUUUUCUUUGGCUCCAAACUCGAGCUGGUCAAGAAGAACAGCGGC
GGAGCCGAUGAGCCCACCAAGGAUGUGUACGAGCUGCAGUACUCUGGCGCCGUCAGAUUCGAUAGCACCCUGCCUGGC
UUCGAGACAAUCAUGAAGGUGCUGAACGAGAACCUGAACGCCUACCAGAAGGAUGGCGGCGCUGACGUGGUGUCUCCU
AAGCCUCAGAGAAAAGGCAGACGGCAGGCCCAAGAGAAGAAAGACGAGGUGGACAACGUGUCCGUGGCCAAGCCUAAG
AGCAGCGUGCAGAGAAACGUGUCCAGAGAGCUGACCCCAGAGGACAGAUCUCUGCUGGCUCAGAUCCUGGACGAUGGC
GUGGUGCCAGAUGGCCUGGAAGAUGACAGCAACGUG

[0487] Hence, preferably the RNA construct comprises a sequence substantially as set out in SEQ ID No: 242, or a fragment or variant thereof.

[0488] In one embodiment, the at least one IIP is FMDV 2B protein (P03307; Protease 3C Genome polyprotein foot-and-mouth disease virus (isolate-/Germany/A5Westerwald/1951 serotype A), or an orthologue thereof. One embodiment of the polypeptide sequence of FMDV 2B protein is represented herein as SEQ ID No: 243, as follows:

[SEQ ID No: 243]
PFFFSDVRSNFSKLVETINQMQEDMSTKHGPDFNRLVSAFEELAAGVKAIRTGLDEAKPWYKLIKLLSRLSCMAAVAA
RSKDPVLVAIMLADTGLEILDSTFVVKKISDSLSSLFHVPAPVFSFGAPILLAGLVKVASSFFRSTPEDLERAEKQ

[0489] Therefore, preferably the RNA construct comprises a nucleotide sequence which encodes an amino acid sequence substantially as set out in SEQ ID No: 243, or a variant or fragment thereof.

[0490] In one embodiment, the FMDV 2B polypeptide is encoded by the DNA nucleotide sequence of SEQ ID No: 244, as follows:

[SEQ ID No: 244]
CCCTTCTTCTTCTCTGACGTTAGGTCAAACTTTTCTAAGCTGGTGGAAACCATCAACCAGATGCAGGAAGACATGTCA
ACAAAACACGGGCCCGACTTTAACCGGTTGGTGTCCGCCTTTGAGGAACTGGCCGCTGGAGTAAAAGCCATCAGGACC
GGCCTCGACGAGGCCAAACCCTGGTACAAGCTTATCAAACTCCTAAGCCGCCTGTCGTGCATGGCCGCTGTGGCAGCA
CGGTCCAAGGACCCAGTCCTTGTGGCCATCATGCTGGCCGACACCGGTCTCGAGATTCTGGACAGCACTTTCGTCGTG
AAGAAGATCTCCGACTCGCTCTCCAGTCTCTTCCACGTGCCGGCCCCCGTCTTCAGTTTCGGAGCCCCGATTCTGCTA
GCCGGGCTGGTCAAGGTCGCCTCGAGTTTCTTCCGGTCCACGCCCGAAGACCTTGAGAGAGCAGAGAAACAG

[0491] Accordingly, preferably the FMDV 2B polypeptide is encoded by the DNA nucleotide sequence substantially as set out in SEQ ID NO: 244, or a variant or fragment thereof.

[0492] One embodiment of codon optimised nucleic acid (DNA) encoding the FMDV 2B polypeptide is provided herein as SEQ ID No: 245, as follows:

[SEQ ID No: 245]
CCGTTCTTCTTTAGCGACGTGCGGAGCAACTTCAGCAAGCTGGTGGAAACCATCAACCAGATGCAAGAGGACATGAGC
ACCAAGCACGGCCCCGACTTCAACAGACTGGTGTCCGCCTTTGAGGAACTGGCCGCTGGCGTGAAGGCCATCAGAACA
GGACTGGATGAGGCCAAGCCTTGGTACAAGCTGATCAAGCTGCTGAGCCGGCTGAGCTGTATGGCTGCTGTGGCCGCC
AGATCCAAGGATCCTGTGCTGGTGGCCATCATGCTGGCCGATACAGGCCTGGAAATCCTGGACAGCACCTTCGTGGTC
AAGAAGATCAGCGACAGCCTGAGCAGCCTGTTCCACGTGCCAGCTCCAGTGTTCTCTTTTGGCGCCCCTATTCTGCTG
GCCGGCCTGGTCAAAGTGGCCAGCAGCTTCTTTAGAAGCACCCCTGAGGACCTGGAACGGGCCGAAAAACAA

[0493] Hence, preferably the RNA construct is encoded by a DNA sequence substantially as set out in SEQ ID No: 245, or a fragment or variant thereof.

[0494] In an embodiment, the RNA sequence corresponding to the codon optimised DNA sequence of SEQ ID No: 245 is provided herein as SEQ ID No: 246, as follows:

[SEQ ID No: 246]
CCGUUCUUCUUUAGCGACGUGCGGAGCAACUUCAGCAAGCUGGUGGAAACCAUCAACCAGAUGCAAGAGGACAUGAGC
ACCAAGCACGGCCCCGACUUCAACAGACUGGUGUCCGCCUUUGAGGAACUGGCCGCUGGCGUGAAGGCCAUCAGAACA
GGACUGGAUGAGGCCAAGCCUUGGUACAAGCUGAUCAAGCUGCUGAGCCGGCUGAGCUGUAUGGCUGCUGUGGCCGCC
AGAUCCAAGGAUCCUGUGCUGGUGGCCAUCAUGCUGGCCGAUACAGGCCUGGAAAUCCUGGACAGCACCUUCGUGGUC
AAGAAGAUCAGCGACAGCCUGAGCAGCCUGUUCCACGUGCCAGCUCCAGUGUUCUCUUUUGGCGCCCCUAUUCUGCUG
GCCGGCCUGGUCAAAGUGGCCAGCAGCUUCUUUAGAAGCACCCCUGAGGACCUGGAACGGGCCGAAAAACAA

[0495] Hence, preferably the RNA construct comprises a sequence substantially as set out in SEQ ID No: 246, or a fragment or variant thereof.

[0496] In one embodiment, the at least one IIP is Influenza virus A PB1-F2 (B4URE5; Protein PB1-F2 Influenza A virus (strain A/Russia:St.Petersburg/8/2006 H1N1), or an orthologue thereof. One embodiment of the polypeptide sequence of Influenza virus A PB1-F2 is represented herein as SEQ ID No: 247, as follows:

[SEQ ID No: 247]
MGQEQDTPWILSTGHISTQKREDGQQTPKLEHRNSTRLMGHFQKTMNQVVMPKQIVYWRRWLSLRNPILVFLKTRVLK
RWRLFSKHE

[0497] Therefore, preferably the RNA construct comprises a nucleotide sequence which encodes an amino acid sequence substantially as set out in SEQ ID No: 247, or a variant or fragment thereof.

[0498] In one embodiment, the Influenza virus A PB1-F2 polypeptide is encoded by the DNA nucleotide sequence of SEQ ID No: 248, as follows:

[SEQ ID No: 248]
ATGGGACAGGAACAGGATACACCATGGATACTGTCAACAGGACACATCAGTACTCAGAAAAGGGAAGATGGACAACAA
ACACCGAAACTGGAGCACCGCAACTCAACCCGATTGATGGGCCACTTCCAGAAGACAATGAACCAAGTGGTTATGCCC
AAACAGATTGTGTATTGGAGGCGATGGCTTTCCTTGAGGAATCCCATCCTGGTATTTTTGAAAACTCGTGTATTGAAA
CGATGGAGGTTGTTCAGCAAACACGAG

[0499] Accordingly, preferably the Influenza virus A PB1-F2 polypeptide is encoded by the DNA nucleotide sequence substantially as set out in SEQ ID NO: 248, or a variant or fragment thereof.

[0500] One embodiment of codon optimised nucleic acid (DNA) encoding the Influenza virus A PB1-F2 polypeptide is provided herein as SEQ ID No: 249, as follows:

[SEQ ID No: 249]
ATGGGCCAAGAGCAGGACACACCTTGGATCCTGAGCACCGGCCACATCAGCACCCAGAAGAGAGAGGACGGACAGCAG
ACCCCTAAGCTGGAACACCGGAACAGCACCAGACTGATGGGCCACTTCCAGAAAACCATGAACCAGGTGGTCATGCCC
AAGCAGATCGTGTACTGGCGGAGATGGCTGAGCCTGCGGAATCCTATCCTGGTGTTCCTGAAAACCCGGGTGCTGAAG
AGATGGCGGCTGTTCTCTAAGCACGAG

[0501] Hence, preferably the RNA construct is encoded by a DNA sequence substantially as set out in SEQ ID No: 249, or a fragment or variant thereof.

[0502] In an embodiment, the RNA sequence corresponding to the codon optimised DNA sequence of SEQ ID No: 249 is provided herein as SEQ ID No: 250, as follows:

[SEQ ID No: 250]
AUGGGCCAAGAGCAGGACACACCUUGGAUCCUGAGCACCGGCCACAUCAGCACCCAGAAGAGAGAGGACGGACAGCAG
ACCCCUAAGCUGGAACACCGGAACAGCACCAGACUGAUGGGCCACUUCCAGAAAACCAUGAACCAGGUGGUCAUGCCC
AAGCAGAUCGUGUACUGGCGGAGAUGGCUGAGCCUGCGGAAUCCUAUCCUGGUGUUCCUGAAAACCCGGGUGCUGAAG
AGAUGGCGGCUGUUCUCUAAGCACGAG

[0503] Hence, preferably the RNA construct comprises a sequence substantially as set out in SEQ ID No: 250, or a fragment or variant thereof.

[0504] In one embodiment, the at least one IIP is Hepatitis A Protein 3ABC (Q05794; Genome polyprotein Human hepatitis A virus genotype IA (isolate HAS-15)), or an orthologue thereof. One embodiment of the polypeptide sequence of Hepatitis A Protein 3ABC is represented herein as SEQ ID No: 251, as follows:

[SEQ ID No: 251]
GISDDDSAVAEFFQSFPSGEPSNSKLSSFFQSVTNHKWVAVGAAVGILGLLVGGWFVYKHFSRKEEEPIPAEGVYHGV
TKPKQVIKLDADPVESQSTLEIAGLVRKNLVQFGVGEKNGCVRWVMNALGVKDDWLLVPSHAYKFEKDYEMMEFYFNR
GGTYYSISAGNVVIQSLDVGFQDVVLMKVPTIPKFRDITQHFIKKGDVPRALNRLATLVTTVNGTPMLISEGPLKMEE
KATYVHKKNDGTTVDLTVDQAWRGKGEGLPGMCGGALVSSNQSIQNAILGIHVAGGNSILVAKLITQEMFQNIDKKIE
SQ

[0505] Therefore, preferably the RNA construct comprises a nucleotide sequence which encodes an amino acid sequence substantially as set out in SEQ ID No: 251, or a variant or fragment thereof.

[0506] In one embodiment, the Hepatitis A Protein 3ABC polypeptide is encoded by the DNA nucleotide sequence of SEQ ID No: 252, as follows:

[SEQ ID No: 252]
GGAATTTCAGATGATGACAGTGCAGTAGCTGAGTTTTTCCAGTCTTTTCCATCTGGTGAACCATCAAATTCCAAGTTA
TCTAGTTTTTTCCAATCTGTCACTAATCACAAGTGGGTTGCTGTGGGAGCTGCAGTTGGTATTCTTGGATTGCTAGTG
GGAGGATGGTTTGTGTATAAGCATTTTTCCCGCAAAGAGGAAGAACCAATTCCAGCTGAAGGGGTTTATCATGGAGTG
ACTAAGCCCAAACAAGTGATTAAATTGGATGCAGATCCAGTAGAGTCCCAGTCAACTCTAGAAATAGCAGGATTAGTT
AGGAAAAATTTGGTTCAGTTTGGAGTTGGTGAGAAAAATGGATGTGTGAGATGGGTCATGAATGCCTTAGGAGTGAAG
GATGATTGGTTGTTAGTACCTTCTCATGCTTATAAATTTGAAAAGGATTATGAAATGATGGAGTTTTATTTCAATAGA
GGTGGAACTTACTATTCAATTTCAGCTGGTAATGTTGTTATTCAATCTTTAGATGTGGGATTCCAAGATGTTGTTCTA
ATGAAGGTTCCTACAATTCCCAAGTTTAGAGATATTACTCAACATTTTATTAAGAAAGGAGATGTGCCTAGAGCCTTG
AATCGCTTGGCAACATTAGTGACAACCGTTAATGGAACTCCTATGTTAATTTCTGAGGGACCTTTAAAAATGGAAGAA
AAAGCCACTTATGTTCATAAGAAGAACGATGGTACTACGGTTGATTTGACTGTAGATCAGGCATGGAGAGGAAAAGGT
GAAGGTCTTCCTGGAATGTGTGGTGGGGCCCTAGTGTCATCAAATCAGTCCATACAAAATGCAATTTTGGGTATTCAT
GTTGCTGGAGGAAATTCAATTCTTGTGGCAAAGTTGATTACTCAAGAAATGTTTCAAAACATTGATAAGAAAATTGAA
AGTCAG

[0507] Accordingly, preferably the Hepatitis A Protein 3ABC polypeptide is encoded by the DNA nucleotide sequence substantially as set out in SEQ ID NO: 252, or a variant or fragment thereof.

[0508] One embodiment of codon optimised nucleic acid (DNA) encoding the Hepatitis A Protein 3ABC polypeptide is provided herein as SEQ ID No: 253, as follows:

[SEQ ID No: 253]
GGCATCAGCGACGATGATTCTGCCGTGGCCGAGTTCTTCCAGAGCTTTCCTAGCGGCGAGCCCAGCAACAGCAAGCTG
AGCAGCTTCTTCCAGTCCGTGACCAACCACAAATGGGTCGCCGTGGGAGCCGCTGTGGGAATTCTGGGACTTCTCGTT
GGCGGATGGTTCGTGTACAAGCACTTCAGCCGGAAAGAGGAAGAACCCATTCCTGCCGAGGGCGTGTACCACGGCGTG
ACCAAACCTAAGCAAGTGATCAAGCTGGACGCCGATCCTGTGGAAAGCCAGAGCACACTGGAAATCGCCGGACTCGTG
CGGAAGAACCTGGTGCAGTTTGGCGTGGGCGAGAAGAACGGCTGTGTCAGATGGGTCATGAACGCCCTGGGCGTGAAG
GACGATTGGCTGCTGGTTCCTAGCCACGCCTACAAGTTCGAGAAGGACTACGAGATGATGGAATTCTACTTCAACAGA
GGCGGCACCTACTACAGCATCAGCGCCGGCAATGTGGTCATCCAGTCTCTGGATGTGGGCTTCCAGGACGTGGTGCTG
ATGAAGGTGCCAACAATCCCCAAGTTCCGGGACATCACCCAGCACTTCATCAAGAAAGGCGACGTGCCCAGGGCTCTG
AACAGACTGGCTACCCTGGTCACCACCGTGAACGGCACACCCATGCTGATCTCTGAGGGCCCACTGAAGATGGAAGAG
AAGGCCACCTACGTGCACAAGAAGAACGACGGCACCACAGTGGACCTGACCGTGGATCAAGCTTGGAGAGGCAAAGGC
GAGGGCCTGCCTGGAATGTGTGGCGGAGCACTGGTGTCCAGCAACCAGAGCATCCAGAATGCCATCCTGGGCATCCAT
GTGGCTGGCGGCAATTCTATCCTGGTGGCCAAGCTGATCACCCAAGAGATGTTCCAGAACATCGACAAGAAGATCGAG
AGCCAG

[0509] Hence, preferably the RNA construct is encoded by a DNA sequence substantially as set out in SEQ ID No: 253, or a fragment or variant thereof.

[0510] In an embodiment, the RNA sequence corresponding to the codon optimised DNA sequence of SEQ ID No: 253 is provided herein as SEQ ID No: 254, as follows:

[SEQ ID No: 254]
GGCAUCAGCGACGAUGAUUCUGCCGUGGCCGAGUUCUUCCAGAGCUUUCCUAGCGGCGAGCCCAGCAACAGCAAGCUG
AGCAGCUUCUUCCAGUCCGUGACCAACCACAAAUGGGUCGCCGUGGGAGCCGCUGUGGGAAUUCUGGGACUUCUCGUU
GGCGGAUGGUUCGUGUACAAGCACUUCAGCCGGAAAGAGGAAGAACCCAUUCCUGCCGAGGGCGUGUACCACGGCGUG
ACCAAACCUAAGCAAGUGAUCAAGCUGGACGCCGAUCCUGUGGAAAGCCAGAGCACACUGGAAAUCGCCGGACUCGUG
CGGAAGAACCUGGUGCAGUUUGGCGUGGGCGAGAAGAACGGCUGUGUCAGAUGGGUCAUGAACGCCCUGGGCGUGAAG
GACGAUUGGCUGCUGGUUCCUAGCCACGCCUACAAGUUCGAGAAGGACUACGAGAUGAUGGAAUUCUACUUCAACAGA
GGCGGCACCUACUACAGCAUCAGCGCCGGCAAUGUGGUCAUCCAGUCUCUGGAUGUGGGCUUCCAGGACGUGGUGCUG
AUGAAGGUGCCAACAAUCCCCAAGUUCCGGGACAUCACCCAGCACUUCAUCAAGAAAGGCGACGUGCCCAGGGCUCUG
AACAGACUGGCUACCCUGGUCACCACCGUGAACGGCACACCCAUGCUGAUCUCUGAGGGCCCACUGAAGAUGGAAGAG
AAGGCCACCUACGUGCACAAGAAGAACGACGGCACCACAGUGGACCUGACCGUGGAUCAAGCUUGGAGAGGCAAAGGC
GAGGGCCUGCCUGGAAUGUGUGGCGGAGCACUGGUGUCCAGCAACCAGAGCAUCCAGAAUGCCAUCCUGGGCAUCCAU
GUGGCUGGCGGCAAUUCUAUCCUGGUGGCCAAGCUGAUCACCCAAGAGAUGUUCCAGAACAUCGACAAGAAGAUCGAG
AGCCAG

[0511] Hence, preferably the RNA construct comprises a sequence substantially as set out in SEQ ID No: 254, or a fragment or variant thereof.

[0512] In one embodiment, the at least one IIP is Hepatitis B X protein (P03165; Protein X Hepatitis B virus genotype D), or an orthologue thereof. One embodiment of the polypeptide sequence of Hepatitis B X protein is represented herein as SEQ ID No: 255, as follows:

[SEQ ID No: 255]
MAARLCCQLDPARDVLCLRPVGAESRGRPFSGSLGTLSSPSPSAVSTDHG
AHLSLRGLPVCAFSSAGPCALRFTSARRMETTVKAQPFLPKVLHKRTLGL
SVMSTTDLEAYFKDCLFKDWEELGEEIRLKVFVLGGCRHKLVCAPAPCNF
FTSA

[0513] Therefore, preferably the RNA construct comprises a nucleotide sequence which encodes an amino acid sequence substantially as set out in SEQ ID No: 255, or a variant or fragment thereof.

[0514] In one embodiment, the Hepatitis B X polypeptide is encoded by the DNA nucleotide sequence of SEQ ID No: 256, as follows:

[SEQ ID No: 256]
ATGGCTGCTAGGCTGTGCTGCCAACTGGATCCTGCGCGGGACGTCCTTTG
TTTACGTCCCGTCGGCGCTGAATCCCGCGGACGACCCTTCTCGGGGTCGC
TTGGGACTCTCTCGTCCCCTTCTCCGTCTGCCGTTTCGACCGACCACGGG
GCGCACCTCTCTTTACGCGGACTCCCCGTCTGTGCCTTCTCATCTGCCGG
ACCGTGTGCACTTCGCTTCACCTCTGCACGTCGCATGGAGACCACCGTGA
AAGCCCAACCATTCTTGCCCAAGGTCTTACATAAGAGGACTCTTGGACTC
TCTGTAATGTCAACGACCGACCTTGAGGCATACTTCAAAGACTGTTTGTT
TAAAGACTGGGAGGAGTTGGGGGAGGAGATTAGATTAAAGGTCTTTGTAT
TAGGAGGCTGTAGGCATAAATTGGTCTGCGCACCAGCACCATGCAACTTT
TTCACCTCTGCC

[0515] Accordingly, preferably the Hepatitis B X polypeptide is encoded by the DNA nucleotide sequence substantially as set out in SEQ ID NO: 256, or a variant or fragment thereof.

[0516] One embodiment of codon optimised nucleic acid (DNA) encoding the Hepatitis B X polypeptide is provided herein as SEQ ID No: 257, as follows:

[SEQ ID No: 257]
ATGGCCGCCAGACTGTGCTGTCAACTGGACCCTGCTAGGGACGTGCTGTG
TCTCAGACCTGTGGGAGCCGAGTCTAGAGGCAGACCTTTTTCTGGCTCTC
TGGGCACCCTGAGCAGCCCATCTCCATCTGCCGTGTCTACAGATCACGGC
GCCCACCTGTCTCTGAGAGGACTGCCTGTGTGTGCCTTTAGCAGCGCCGG
ACCTTGCGCTCTGAGATTCACATCTGCCAGACGGATGGAAACCACCGTGA
AGGCCCAGCCTTTCCTGCCTAAGGTGCTGCACAAGAGAACCCTGGGCCTG
AGCGTGATGAGCACCACAGATCTGGAAGCCTACTTCAAGGATTGCCTGTT
CAAGGACTGGGAAGAACTGGGCGAAGAGATCCGGCTGAAGGTGTTCGTGC
TCGGCGGATGCAGACACAAGCTCGTGTGTGCTCCCGCTCCTTGCAACTTC
TTTACCAGCGCT

[0517] Hence, preferably the RNA construct is encoded by a DNA sequence substantially as set out in SEQ ID No: 257, or a fragment or variant thereof.

[0518] In an embodiment, the RNA sequence corresponding to the codon optimised DNA sequence of SEQ ID No: 257 is provided herein as SEQ ID No: 258, as follows:

[SEQ ID No: 258]
AUGGCCGCCAGACUGUGCUGUCAACUGGACCCUGCUAGGGACGUGCUGUG
UCUCAGACCUGUGGGAGCCGAGUCUAGAGGCAGACCUUUUUCUGGCUCUC
UGGGCACCCUGAGCAGCCCAUCUCCAUCUGCCGUGUCUACAGAUCACGGC
GCCCACCUGUCUCUGAGAGGACUGCCUGUGUGUGCCUUUAGCAGCGCCGG
ACCUUGCGCUCUGAGAUUCACAUCUGCCAGACGGAUGGAAACCACCGUGA
AGGCCCAGCCUUUCCUGCCUAAGGUGCUGCACAAGAGAACCCUGGGCCUG
AGCGUGAUGAGCACCACAGAUCUGGAAGCCUACUUCAAGGAUUGCCUGUU
CAAGGACUGGGAAGAACUGGGCGAAGAGAUCCGGCUGAAGGUGUUCGUGC
UCGGCGGAUGCAGACACAAGCUCGUGUGUGCUCCCGCUCCUUGCAACUUC
UUUACCAGCGCU

[0519] Hence, preferably the RNA construct comprises a sequence substantially as set out in SEQ ID No: 258, or a fragment or variant thereof.

[0520] In one embodiment, the at least one IIP is SARS-CoV NSP15 (P0C6X7; Replicase polyprotein Severe acute respiratory syndrome coronavirus), or an orthologue thereof. One embodiment of the polypeptide sequence of SARS-CoV NSP15 is represented herein as SEQ ID No: 259, as follows:

[SEQ ID No: 259]
SLENVAYNVVNKGHFDGHAGEAPVSIINNAVYTKVDGIDVEIFENKTTLP
VNVAFELWAKRNIKPVPEIKILNNLGVDIAANTVIWDYKREAPAHVSTIG
VCTMTDIAKKPTESACSSLTVLFDGRVEGQVDLFRNARNGVLITEGSVKG
LTPSKGPAQASVNGVTLIGESVKTQFNYFKKVDGIIQQLPETYFTQSRDL
EDFKPRSQMETDFLELAMDEFIQRYKLEGYAFEHIVYGDFSHGQLGGLHL
MIGLAKRSQDSPLKLEDFIPMDSTVKNYFITDAQTGSSKCVCSVIDLLLD
DFVEIIKSQDLSVISKVVKVTIDYAEISFMLWCKDGHVETFYPKLQ

[0521] Therefore, preferably the RNA construct comprises a nucleotide sequence which encodes an amino acid sequence substantially as set out in SEQ ID No: 259, or a variant or fragment thereof.

[0522] In one embodiment, the SARS-CoV NSP15 polypeptide is encoded by the DNA nucleotide sequence of SEQ ID No: 260, as follows:

[SEQ ID No: 260]
AGTTTAGAAAATGTGGCTTATAATGTTGTTAATAAAGGACACTTTGATGG
ACACGCCGGCGAAGCACCTGTTTCCATCATTAATAATGCTGTTTACACAA
AGGTAGATGGTATTGATGTGGAGATCTTTGAAAATAAGACAACACTTCCT
GTTAATGTTGCATTTGAGCTTTGGGCTAAGCGTAACATTAAACCAGTGCC
AGAGATTAAGATACTCAATAATTTGGGTGTTGATATCGCTGCTAATACTG
TAATCTGGGACTACAAAAGAGAAGCCCCAGCACATGTATCTACAATAGGT
GTCTGCACAATGACTGACATTGCCAAGAAACCTACTGAGAGTGCTTGTTC
TTCACTTACTGTCTTGTTTGATGGTAGAGTGGAAGGACAGGTAGACCTTT
TTAGAAACGCCCGTAATGGTGTTTTAATAACAGAAGGTTCAGTCAAAGGT
CTAACACCTTCAAAGGGACCAGCACAAGCTAGCGTCAATGGAGTCACATT
AATTGGAGAATCAGTAAAAACACAGTTTAACTACTTTAAGAAAGTAGACG
GCATTATTCAACAGTTGCCTGAAACCTACTTTACTCAGAGCAGAGACTTA
GAGGATTTTAAGCCCAGATCACAAATGGAAACTGACTTTCTCGAGCTCGC
TATGGATGAATTCATACAGCGATATAAGCTCGAGGGCTATGCCTTCGAAC
ACATCGTTTATGGAGATTTCAGTCATGGACAACTTGGCGGTCTTCATTTA
ATGATAGGCTTAGCCAAGCGCTCACAAGATTCACCACTTAAATTAGAGGA
TTTTATCCCTATGGACAGCACAGTGAAAAATTACTTCATAACAGATGCGC
AAACAGGTTCATCAAAATGTGTGTGTTCTGTGATTGATCTTTTACTTGAT
GACTTTGTCGAGATAATAAAGTCACAAGATTTGTCAGTGATTTCAAAAGT
GGTCAAGGTTACAATTGACTATGCTGAAATTTCATTCATGCTTTGGTGTA
AGGATGGACATGTTGAAACCTTCTACCCAAAACTACAA

[0523] Accordingly, preferably the SARS-CoV NSP15 polypeptide is encoded by the DNA nucleotide sequence substantially as set out in SEQ ID NO: 260, or a variant or fragment thereof.

[0524] One embodiment of codon optimised nucleic acid (DNA) encoding the SARS-CoV NSP15 polypeptide is provided herein as SEQ ID No: 261, as follows:

[SEQ ID No: 261]
AGCCTGGAAAACGTGGCCTACAACGTGGTCAACAAGGGCCACTTTGATGG
CCACGCTGGCGAAGCCCCTGTGTCCATCATTAACAACGCCGTGTACACCA
AGGTGGACGGCATCGACGTGGAAATCTTCGAGAACAAGACCACACTGCCC
GTGAATGTGGCCTTCGAGCTGTGGGCCAAGCGGAACATTAAGCCCGTGCC
TGAGATCAAGATCCTGAACAACCTGGGCGTCGACATTGCCGCCAACACCG
TGATCTGGGACTACAAGAGAGAAGCCCCAGCTCACGTGTCCACCATCGGC
GTGTGTACCATGACCGATATCGCCAAGAAGCCCACCGAGAGCGCCTGTAG
CTCTCTGACCGTGCTGTTCGACGGCAGAGTGGAAGGCCAGGTGGACCTGT
TCAGAAACGCCAGAAACGGCGTGCTGATCACCGAGGGCTCTGTGAAGGGA
CTGACCCCTTCTAAGGGACCTGCTCAGGCCTCTGTGAATGGCGTGACACT
GATCGGCGAGAGCGTGAAAACCCAGTTCAACTACTTCAAGAAGGTCGACG
GGATCATCCAGCAGCTGCCCGAGACATACTTCACCCAGAGCCGCGACCTG
GAAGATTTCAAGCCTCGGAGCCAGATGGAAACCGACTTCCTGGAACTGGC
CATGGACGAGTTCATCCAGCGGTACAAGCTGGAAGGCTACGCCTTTGAGC
ACATCGTGTACGGCGATTTCAGCCACGGACAGCTCGGAGGACTGCACCTG
ATGATTGGCCTGGCCAAGAGAAGCCAGGACAGCCCTCTGAAGCTCGAGGA
CTTCATCCCCATGGACAGCACCGTGAAGAATTACTTCATCACAGACGCCC
AGACCGGCAGCTCTAAGTGCGTGTGTAGCGTGATCGACCTGCTGCTGGAC
GACTTTGTGGAAATCATCAAGAGCCAGGACCTGAGCGTGATCTCCAAGGT
GGTCAAAGTGACCATCGACTACGCCGAGATCAGCTTCATGCTGTGGTGCA
AGGACGGCCACGTGGAAACATTCTACCCCAAGCTGCAG

[0525] Hence, preferably the RNA construct is encoded by a DNA sequence substantially as set out in SEQ ID No: 261, or a fragment or variant thereof.

[0526] In an embodiment, the RNA sequence corresponding to the codon optimised DNA sequence of SEQ ID No: 261 is provided herein as SEQ ID No: 262, as follows:

[SEQ ID No: 262]
AGCCUGGAAAACGUGGCCUACAACGUGGUCAACAAGGGCCACUUUGAUGG
CCACGCUGGCGAAGCCCCUGUGUCCAUCAUUAACAACGCCGUGUACACCA
AGGUGGACGGCAUCGACGUGGAAAUCUUCGAGAACAAGACCACACUGCCC
GUGAAUGUGGCCUUCGAGCUGUGGGCCAAGCGGAACAUUAAGCCCGUGCC
UGAGAUCAAGAUCCUGAACAACCUGGGCGUCGACAUUGCCGCCAACACCG
UGAUCUGGGACUACAAGAGAGAAGCCCCAGCUCACGUGUCCACCAUCGGC
GUGUGUACCAUGACCGAUAUCGCCAAGAAGCCCACCGAGAGCGCCUGUAG
CUCUCUGACCGUGCUGUUCGACGGCAGAGUGGAAGGCCAGGUGGACCUGU
UCAGAAACGCCAGAAACGGCGUGCUGAUCACCGAGGGCUCUGUGAAGGGA
CUGACCCCUUCUAAGGGACCUGCUCAGGCCUCUGUGAAUGGCGUGACACU
GAUCGGCGAGAGCGUGAAAACCCAGUUCAACUACUUCAAGAAGGUCGACG
GGAUCAUCCAGCAGCUGCCCGAGACAUACUUCACCCAGAGCCGCGACCUG
GAAGAUUUCAAGCCUCGGAGCCAGAUGGAAACCGACUUCCUGGAACUGGC
CAUGGACGAGUUCAUCCAGCGGUACAAGCUGGAAGGCUACGCCUUUGAGC
ACAUCGUGUACGGCGAUUUCAGCCACGGACAGCUCGGAGGACUGCACCUG
AUGAUUGGCCUGGCCAAGAGAAGCCAGGACAGCCCUCUGAAGCUCGAGGA
CUUCAUCCCCAUGGACAGCACCGUGAAGAAUUACUUCAUCACAGACGCCC
AGACCGGCAGCUCUAAGUGCGUGUGUAGCGUGAUCGACCUGCUGCUGGAC
GACUUUGUGGAAAUCAUCAAGAGCCAGGACCUGAGCGUGAUCUCCAAGGU
GGUCAAAGUGACCAUCGACUACGCCGAGAUCAGCUUCAUGCUGUGGUGCA
AGGACGGCCACGUGGAAACAUUCUACCCCAAGCUGCAG

[0527] Hence, preferably the RNA construct comprises a sequence substantially as set out in SEQ ID No: 262, or a fragment or variant thereof.

[0528] In one embodiment, the at least one IIP is SARS CoV Orf9b (P59636; SARS ORF9b protein Severe acute respiratory syndrome coronavirus), or an orthologue thereof. One embodiment of the polypeptide sequence of SARS CoV Orf9b is represented herein as SEQ ID No: 263, as follows:

[SEQ ID No: 263]
MDPNQTNVVPPALHLVDPQIQLTITRMEDAMGQGQNSADPKVYPIILRLG
SQLSLSMARRNLDSLEARAFQSTPIVVQMTKLATTEELPDEFVVVTAK

[0529] Therefore, preferably the RNA construct comprises a nucleotide sequence which encodes an amino acid sequence substantially as set out in SEQ ID No: 263, or a variant or fragment thereof.

[0530] In one embodiment, the SARS CoV Orf9b polypeptide is encoded by the DNA nucleotide sequence of SEQ ID No: 264, as follows:

[SEQ ID No: 264]
ATGGACCCCAATCAAACCAACGTAGTGCCCCCCGCATTACATTTGGTGGA
CCCACAGATTCAACTGACAATAACCAGAATGGAGGACGCAATGGGGCAAG
GCCAAAACAGCGCCGACCCCAAGGTTTACCCAATAATACTGCGTCTTGGT
TCACAGCTCTCACTCAGCATGGCAAGGAGGAACTTAGATTCCCTCGAGGC
CAGGGCGTTCCAATCAACACCAATAGTGGTCCAGATGACCAAATTGGCTA
CTACCGAAGAGCTACCCGACGAGTTCGTGGTGGTGACGGCAAAA

[0531] Accordingly, preferably the SARS CoV Orf9b polypeptide is encoded by the DNA nucleotide sequence substantially as set out in SEQ ID NO: 264, or a variant or fragment thereof.

[0532] One embodiment of codon optimised nucleic acid (DNA) encoding the SARS CoV Orf9b polypeptide is provided herein as SEQ ID No: 265, as follows:

[SEQ ID No: 265]
ATGGACCCCAACCAGACCAATGTGGTGCCTCCTGCTCTGCACCTGGTGGA
CCCTCAGATCCAGCTGACCATCACCAGAATGGAAGATGCCATGGGCCAGG
GCCAGAACAGCGCCGATCCTAAGGTGTACCCCATCATCCTGAGACTGGGC
AGCCAGCTGAGCCTGAGCATGGCCAGAAGAAACCTGGACAGCCTGGAAGC
CAGAGCCTTCCAGAGCACACCTATCGTGGTGCAGATGACCAAGCTGGCCA
CCACCGAGGAACTGCCCGATGAGTTTGTGGTGGTCACCGCCAAA

[0533] Hence, preferably the RNA construct is encoded by a DNA sequence substantially as set out in SEQ ID No: 265, or a fragment or variant thereof.

[0534] In an embodiment, the RNA sequence corresponding to the codon optimised DNA sequence of SEQ ID No: 265 is provided herein as SEQ ID No: 266, as follows:

[SEQ ID No: 266]
AUGGACCCCAACCAGACCAAUGUGGUGCCUCCUGCUCUGCACCUGGUGGA
CCCUCAGAUCCAGCUGACCAUCACCAGAAUGGAAGAUGCCAUGGGCCAGG
GCCAGAACAGCGCCGAUCCUAAGGUGUACCCCAUCAUCCUGAGACUGGGC
AGCCAGCUGAGCCUGAGCAUGGCCAGAAGAAACCUGGACAGCCUGGAAGC
CAGAGCCUUCCAGAGCACACCUAUCGUGGUGCAGAUGACCAAGCUGGCCA
CCACCGAGGAACUGCCCGAUGAGUUUGUGGUGGUCACCGCCAAA

[0535] Hence, preferably the RNA construct comprises a sequence substantially as set out in SEQ ID No: 266, or a fragment or variant thereof.

[0536] In one embodiment, the at least one IIP is Rhinovirus 2Apro (P23008; Genome polyprotein Human rhinovirus 1A), or an orthologue thereof. One embodiment of the polypeptide sequence of Rhinovirus 2Apro is represented herein as SEQ ID No: 267, as follows:

[SEQ ID No: 267]
GPSDLYVHVGNLIYRNLHLFNSEMHDSILISYSSDLITYRTNTIGDDYIP
NCNCTEATYYCRHKNRYYPIKVTPHDWYEIQESEYYPKHIQYNLLIGEGP
CEPGDCGGKLLCRHGVIGIITAGGEGHVAFIDLRQFHCAEEQ

[0537] Therefore, preferably the RNA construct comprises a nucleotide sequence which encodes an amino acid sequence substantially as set out in SEQ ID No: 267, or a variant or fragment thereof.

[0538] In one embodiment, the Rhinovirus 2Apro polypeptide is encoded by the DNA nucleotide sequence of SEQ ID No: 268, as follows:

[SEQ ID No: 268]
GGGCCCAGTGATCTATATGTGCATGTAGGTAACTTAATATATAGAAACTT
ACATCTGTTCAATTCTGAAATGCATGATTCAATTTTGATTTCATACTCTT
CTGATTTAATCATATACCGCACAAACACTATAGGTGATGATTATATTCCC
AATTGTAACTGCACTGAGGCTACTTATTATTGTAGACACAAAAATAGGTA
TTACCCAATAAAAGTTACTCCACATGATTGGTATGAAATACAAGAGAGTG
AATATTACCCCAAACACATCCAATACAACCTATTAATTGGTGAAGGACCA
TGTGAACCTGGTGATTGTGGTGGAAAACTTCTTTGTAGACATGGTGTCAT
TGGCATAATCACAGCAGGTGGTGAAGGTCATGTAGCATTTATAGATCTTA
GACAATTTCACTGTGCTGAGGAACAA

[0539] Accordingly, preferably the Rhinovirus 2Apro polypeptide is encoded by the DNA nucleotide sequence substantially as set out in SEQ ID NO: 268, or a variant or fragment thereof.

[0540] One embodiment of codon optimised nucleic acid (DNA) encoding the Rhinovirus 2Apro polypeptide is provided herein as SEQ ID No: 269, as follows:

[SEQ ID No: 269]
GGCCCTAGCGATCTGTATGTGCACGTGGGCAACCTGATCTACCGGAACCT
GCACCTGTTCAACAGCGAGATGCACGACAGCATCCTGATCAGCTACAGCA
GCGACCTGATCATCTATCGGACCAACACCATCGGCGACGACTACATCCCC
AACTGCAACTGTACCGAGGCCACCTACTACTGCCGGCACAAGAACCGGTA
CTACCCCATCAAAGTGACCCCTCACGATTGGTACGAGATCCAAGAGAGCG
AGTACTACCCTAAGCACATCCAGTACAACCTGCTGATCGGCGAGGGACCT
TGCGAGCCTGGCGATTGTGGTGGAAAGCTGCTGTGTAGACACGGCGTGAT
CGGCATCATTACAGCCGGCGGAGAAGGACACGTGGCCTTTATCGACCTGC
GGCAGTTTCACTGCGCCGAGGAACAG

[0541] Hence, preferably the RNA construct is encoded by a DNA sequence substantially as set out in SEQ ID No: 269, or a fragment or variant thereof.

[0542] In an embodiment, the RNA sequence corresponding to the codon optimised DNA sequence of SEQ ID No: 269 is provided herein as SEQ ID No: 270, as follows:

[SEQ ID No: 270]
GGCCCUAGCGAUCUGUAUGUGCACGUGGGCAACCUGAUCUACCGGAACCU
GCACCUGUUCAACAGCGAGAUGCACGACAGCAUCCUGAUCAGCUACAGCA
GCGACCUGAUCAUCUAUCGGACCAACACCAUCGGCGACGACUACAUCCCC
AACUGCAACUGUACCGAGGCCACCUACUACUGCCGGCACAAGAACCGGUA
CUACCCCAUCAAAGUGACCCCUCACGAUUGGUACGAGAUCCAAGAGAGCG
AGUACUACCCUAAGCACAUCCAGUACAACCUGCUGAUCGGCGAGGGACCU
UGCGAGCCUGGCGAUUGUGGUGGAAAGCUGCUGUGUAGACACGGCGUGAU
CGGCAUCAUUACAGCCGGCGGAGAAGGACACGUGGCCUUUAUCGACCUGC
GGCAGUUUCACUGCGCCGAGGAACAG

[0543] Hence, preferably the RNA construct comprises a sequence substantially as set out in SEQ ID No: 270, or a fragment or variant thereof.

[0544] In one embodiment, the at least one IIP is Rhinovirus 3Cpro (P23008; Genome polyprotein Human rhinovirus 1A), or an orthologue thereof. One embodiment of the polypeptide sequence of Rhinovirus 3Cpro is represented herein as SEQ ID No: 271, as follows:

[SEQ ID No: 271]
GPEEEFGRSILKNNTCVITTGNGKFTGLGIHDRILIIPTHADPGREVQVN
GVHTKVLDSYDLYNRDGVKLEITVIQLDRNEKFRDIRKYIPETEDDYPEC
NLALSANQDEPTIIKVGDVVSYGNILLSGNQTARMLKYNYPTKSGYCGGV
LYKIGQILGIHVGGNGRDGFSAMLLRSYFTDTQ

[0545] Therefore, preferably the RNA construct comprises a nucleotide sequence which encodes an amino acid sequence substantially as set out in SEQ ID No: 271, or a variant or fragment thereof.

[0546] In one embodiment, the Rhinovirus 3Cpro polypeptide is encoded by the DNA nucleotide sequence of SEQ ID No: 272, as follows:

[SEQ ID No: 272]
GGTCCAGAAGAAGAATTTGGAAGGTCAATTCTCAAAAACAATACTTGTGT
GATTACTACAGGTAATGGAAAATTTACAGGTCTTGGTATACATGACAGAA
TTCTAATCATCCCAACACATGCTGATCCAGGTAGAGAGGTCCAAGTTAAT
GGTGTCCACACTAAGGTTCTAGACTCATATGATCTTTATAATAGAGATGG
AGTTAAACTTGAAATAACGGTCATACAATTAGATAGAAATGAAAAATTTA
GGGACATTAGAAAGTATATACCTGAAACAGAAGACGATTATCCAGAATGC
AATTTGGCACTTTCAGCTAATCAAGATGAACCAACTATAATTAAAGTAGG
AGATGTAGTGTCCTATGGCAATATTTTGCTTAGTGGAAATCAAACAGCCA
GAATGCTTAAATATAATTACCCCACAAAATCAGGGTATTGTGGAGGGGTA
CTATATAAAATTGGTCAAATTCTAGGTATTCATGTGGGTGGAAATGGAAG
GGATGGTTTTTCAGCTATGTTACTTAGATCATACTTTACAGATACTCAG

[0547] Accordingly, preferably the Rhinovirus 3Cpro polypeptide is encoded by the DNA nucleotide sequence substantially as set out in SEQ ID NO: 272, or a variant or fragment thereof.

[0548] One embodiment of codon optimised nucleic acid (DNA) encoding the Rhinovirus 3Cpro polypeptide is provided herein as SEQ ID No: 273, as follows:

[SEQ ID No: 273]
GGACCTGAGGAAGAGTTCGGCAGATCCATCCTGAAGAACAATACCTGCGT
GATCACCACCGGCAACGGCAAGTTTACAGGCCTGGGCATCCACGACCGGA
TCCTGATCATTCCCACACACGCCGATCCTGGCCGGGAAGTGCAAGTGAAT
GGCGTGCACACCAAGGTGCTGGACAGCTACGACCTGTACAACCGCGACGG
CGTGAAGCTGGAAATCACCGTGATTCAGCTGGACCGGAACGAGAAGTTCC
GGGACATCCGGAAGTACATCCCCGAGACAGAGGACGACTACCCCGAGTGT
AATCTGGCCCTGAGCGCCAACCAGGACGAGCCCACAATTATCAAAGTGGG
CGACGTGGTGTCCTACGGCAACATCCTGCTGTCCGGCAATCAGACCGCCA
GAATGCTGAAGTACAACTACCCCACCAAGAGCGGCTACTGTGGCGGCGTG
CTGTATAAGATCGGCCAGATCCTGGGAATTCACGTCGGCGGCAATGGCAG
AGATGGCTTCTCTGCTATGCTGCTGCGGAGCTACTTCACCGACACACAG

[0549] Hence, preferably the RNA construct is encoded by a DNA sequence substantially as set out in SEQ ID No: 273, or a fragment or variant thereof.

[0550] In an embodiment, the RNA sequence corresponding to the codon optimised DNA sequence of SEQ ID No: 273 is provided herein as SEQ ID No: 274, as follows:

[SEQ ID No: 274]
GGACCUGAGGAAGAGUUCGGCAGAUCCAUCCUGAAGAACAAUACCUGCGU
GAUCACCACCGGCAACGGCAAGUUUACAGGCCUGGGCAUCCACGACCGGA
UCCUGAUCAUUCCCACACACGCCGAUCCUGGCCGGGAAGUGCAAGUGAAU
GGCGUGCACACCAAGGUGCUGGACAGCUACGACCUGUACAACCGCGACGG
CGUGAAGCUGGAAAUCACCGUGAUUCAGCUGGACCGGAACGAGAAGUUCC
GGGACAUCCGGAAGUACAUCCCCGAGACAGAGGACGACUACCCCGAGUGU
AAUCUGGCCCUGAGCGCCAACCAGGACGAGCCCACAAUUAUCAAAGUGGG
CGACGUGGUGUCCUACGGCAACAUCCUGCUGUCCGGCAAUCAGACCGCCA
GAAUGCUGAAGUACAACUACCCCACCAAGAGCGGCUACUGUGGCGGCGUG
CUGUAUAAGAUCGGCCAGAUCCUGGGAAUUCACGUCGGCGGCAAUGGCAG
AGAUGGCUUCUCUGCUAUGCUGCUGCGGAGCUACUUCACCGACACACAG

[0551] Hence, preferably the RNA construct comprises a sequence substantially as set out in SEQ ID No: 274, or a fragment or variant thereof.

[0552] In one embodiment, the at least one IIP is Rotavirus VP3 (A2T3S5; Protein VP3 Rotavirus A (isolate RVA/Monkey/South Africa/SA11-H96/1958/G3P5B[2])), or an orthologue thereof. One embodiment of the polypeptide sequence of Rotavirus VP3 is represented herein as SEQ ID No: 275, as follows:

[SEQ ID No: 275]
MKVLALRHSVAQVYADTQVYVHDDTKDSYENAFLISNLTTHNILYLNYSI
KTLEILNKSGIAAIALQSLEELFTLIRCNFTYDYELDIIYLHDYSYYTNN
EIRTDQHWITKTNIEEYLLPGWKLTYVGYNGSETRGHYNFSFKCQNAATD
DDLIIEYIYSEALDFQNFMLKKIKERMTTSLPIARLSNRVFRDKLFPSLL
KEHKNVVNVGPRNESMFTFLNYPTIKQFSNGAYLVKDTIKLKQERWLGKR
ISQFDIGQYKNMLNVLTAIYYYYNLYKSKPIIYMIGSAPSYWIYDVRHYS
DFFFETWDPLDTPYSSIHHKELFFINDVKKLKDNSILYIDIRTDRGNADW
KKWRKTVEEQTINNLDIAYEYLRTGKAKVCCVKMTAMDLELPISAKLLHH
PTTEIRSEFYLLLDTWDLTNIRRFIPKGVLYSFINNIITENVFIQQPFKV
KVLNDSYIVALYALSNDFNNRSEVIKLINNQKQSLITVRINNTFKDEPKV
GFKNIYDWTFLPTDFDTKEAIITSYDGCLGLFGLSISLASKPTGNNHLFI
LSGTDKYYKLDQFANHTSISRRSHQIRFSESATSYSGYIFRDLSNNNFNL
IGTNIENSVSGHVYNALIYYRYNYSFDLKRWIYLHSIDKVDIEGGKYYEL
APIELIYACRSAKEFATLQDDLTVLRYSNEIENYINTVYSITYADDPNYF
IGIQFRNIPYKYDVKIPHLTFGVLHISDNMVPDVIDILKIMKNELFKMDI
TTSYTYMLSDGIYVANVSGVLSTYFKIYNVFYKNQITFGQSRMFIPHITL
SFNNMRTVRIETTKLQIKSTYLRKIKGDTVFDMVE

[0553] Therefore, preferably the RNA construct comprises a nucleotide sequence which encodes an amino acid sequence substantially as set out in SEQ ID No: 275, or a variant or fragment thereof.

[0554] In one embodiment, the Rotavirus VP3 polypeptide is encoded by the DNA nucleotide sequence of SEQ ID No: 276, as follows:

[SEQ ID No: 276]
ATGAAAGTACTAGCTTTAAGACACAGTGTGGCTCAAGTGTATGCAGACAC
TCAAGTCTACGTTCATGATGATACAAAAGATAGTTATGAAAACGCTTTTT
TAATCTCTAATCTTACGACCCATAATATTTTATACTTAAATTATAGCATT
AAAACATTAGAAATATTAAATAAGTCAGGAATAGCTGCAATTGCTTTACA
ATCACTTGAAGAATTATTCACATTAATAAGGTGTAATTTCACTTATGATT
ATGAACTTGATATAATATATTTACATGATTATTCATATTATACCAATAAT
GAAATTAGAACAGACCAACATTGGATAACAAAAACAAATATTGAAGAATA
TTTACTACCTGGATGGAAATTAACATATGTTGGTTATAATGGAAGTGAAA
CTAGAGGACATTATAACTTTTCATTTAAATGTCAAAACGCTGCAACAGAT
GATGATCTAATAATTGAATACATTTATTCAGAAGCGTTGGACTTCCAAAA
TTTTATGTTAAAAAAGATAAAGGAAAGAATGACTACATCGTTGCCTATAG
CTAGATTATCTAACAGAGTATTTAGGGATAAGTTATTCCCATCATTATTG
AAAGAACATAAGAATGTAGTGAACGTTGGTCCGCGTAATGAATCTATGTT
TACATTTTTAAATTATCCAACTATAAAACAATTTTCAAATGGTGCGTATT
TAGTAAAAGATACTATAAAATTAAAACAAGAACGATGGTTAGGTAAAAGG
ATATCTCAGTTTGATATTGGTCAGTATAAAAATATGCTGAATGTTCTTAC
AGCAATTTATTATTACTATAATTTATATAAAAGTAAACCAATTATATATA
TGATCGGATCTGCTCCATCTTATTGGATATATGACGTTAGGCATTATTCC
GATTTTTTCTTTGAAACTTGGGATCCATTGGACACACCATATTCATCAAT
CCATCACAAAGAATTATTTTTTATAAATGATGTGAAGAAACTGAAGGATA
ACTCAATATTGTATATTGATATAAGAACCGATAGGGGCAATGCTGATTGG
AAAAAATGGAGAAAGACAGTAGAAGAACAAACTATTAATAATTTGGACAT
AGCTTATGAATATTTACGAACGGGTAAAGCGAAGGTGTGTTGTGTTAAGA
TGACAGCTATGGATTTGGAACTGCCAATTTCAGCTAAATTACTGCACCAC
CCAACTACGGAAATAAGATCAGAATTTTATTTATTACTAGATACTTGGGA
TTTAACTAACATTAGGAGGTTCATTCCTAAAGGCGTGTTATATTCATTTA
TAAACAATATAATAACTGAAAATGTGTTTATTCAACAACCATTTAAAGTA
AAAGTACTGAATGATAGTTATATTGTAGCGTTATATGCATTATCAAATGA
TTTTAATAATAGATCAGAAGTAATTAAATTAATTAATAATCAGAAACAAT
CTCTAATAACTGTTAGAATAAATAATACGTTTAAGGATGAACCAAAAGTT
GGGTTCAAAAATATCTATGATTGGACCTTTCTTCCAACCGACTTTGATAC
CAAAGAAGCTATAATTACTTCATACGACGGTTGTTTAGGACTCTTTGGTT
TGTCTATATCGTTAGCATCAAAACCAACAGGGAATAATCATTTATTCATT
TTAAGTGGTACAGATAAGTATTATAAATTGGATCAATTTGCTAATCACAC
CAGTATATCGAGAAGATCACACCAAATTAGGTTTTCGGAATCTGCTACTT
CATATTCAGGTTATATATTTAGAGATTTGTCCAATAATAATTTTAATCTA
ATTGGTACTAATATAGAGAATTCAGTATCAGGTCATGTATATAATGCTTT
AATTTATTATAGATATAATTATTCATTTGATCTTAAACGCTGGATTTATT
TACATTCTATAGATAAAGTTGATATAGAAGGAGGAAAGTATTATGAACTC
GCACCAATAGAATTAATTTATGCATGTAGATCAGCAAAAGAATTTGCTAC
ATTGCAGGATGACTTAACTGTATTGAGATATTCAAACGAAATAGAGAATT
ATATTAATACAGTATATAGTATAACATACGCTGATGATCCGAATTACTTT
ATCGGAATACAATTTAGAAATATACCATATAAATATGATGTTAAAATACC
GCATTTAACCTTCGGAGTATTACATATTTCTGATAACATGGTGCCAGACG
TGATTGACATACTAAAGATAATGAAGAATGAATTATTTAAAATGGATATT
ACGACCAGTTATACATATATGTTATCAGATGGAATCTACGTAGCAAATGT
TAGTGGAGTATTATCTACATACTTTAAAATCTATAACGTATTTTATAAAA
ATCAAATAACTTTTGGCCAATCCAGAATGTTTATTCCGCACATAACATTA
AGCTTCAATAACATGAGAATGGTTGAG

[0555] Accordingly, preferably the Rotavirus VP3 polypeptide is encoded by the DNA nucleotide sequence substantially as set out in SEQ ID NO: 276, or a variant or fragment thereof.

[0556] One embodiment of codon optimised nucleic acid (DNA) encoding the Rotavirus VP3 polypeptide is provided herein as SEQ ID No: 277, as follows:

[SEQ ID No: 277]
ATGAAGGTGCTGGCCCTGAGACATTCTGTGGCCCAGGTGTACGCCGACAC
ACAGGTCTACGTGCACGACGACACCAAGGACAGCTACGAGAACGCCTTCC
TGATCAGCAACCTGACCACACACAACATCCTGTACCTGAACTACAGCATC
AAGACCCTCGAGATCCTGAACAAGAGCGGAATCGCCGCTATCGCCCTGCA
GAGCCTGGAAGAACTGTTCACCCTGATCCGGTGCAACTTCACCTACGACT
ACGAGCTGGACATCATCTACCTGCACGATTACAGCTACTACACCAACAAC
GAGATCCGGACCGACCAGCACTGGATCACCAAGACCAACATCGAGGAATA
CCTGCTGCCTGGCTGGAAGCTGACCTACGTGGGCTACAATGGCAGCGAGA
CACGGGGCCACTACAACTTCAGCTTCAAGTGCCAGAACGCCGCCACCGAC
GACGACCTGATCATCGAGTACATCTACAGCGAGGCCCTGGACTTCCAGAA
CTTCATGCTGAAGAAAATCAAAGAACGGATGACCACCAGCCTGCCTATCG
CCAGACTGAGCAACCGGGTGTTCCGGGACAAGCTGTTTCCCAGCCTGCTG
AAAGAACACAAGAACGTGGTCAACGTGGGCCCCAGAAACGAGAGCATGTT
CACCTTTCTGAACTACCCCACCATCAAGCAGTTCAGCAACGGCGCCTACC
TGGTCAAGGACACAATCAAGCTGAAGCAAGAGAGATGGCTGGGCAAGAGA
ATCAGCCAGTTCGACATCGGCCAGTACAAGAACATGCTGAACGTGCTGAC
CGCCATCTACTACTACTATAACCTGTACAAGAGCAAGCCGATCATCTACA
TGATTGGCAGCGCCCCTAGCTACTGGATCTACGACGTGCGGCACTACAGC
GACTTTTTCTTCGAAACCTGGGATCCCCTGGACACCCCTTACAGCAGCAT
CCACCACAAAGAGCTGTTCTTCATCAACGACGTGAAGAAGCTCAAGGACA
ACAGCATCCTCTACATCGACATCAGAACCGACCGGGGCAACGCCGACTGG
AAGAAATGGCGGAAAACCGTGGAAGAACAGACCATCAACAACCTGGATAT
CGCCTACGAGTACCTGCGGACCGGCAAGGCCAAAGTGTGCTGCGTGAAGA
TGACAGCCATGGACCTGGAACTGCCCATCAGCGCCAAACTGCTGCACCAT
CCTACCACCGAGATCAGAAGCGAGTTCTATCTGCTGCTGGACACCTGGGA
CCTGACCAATATCAGACGGTTCATCCCCAAGGGCGTGCTGTACTCCTTTA
TCAACAACATCATCACCGAGAACGTGTTCATCCAGCAGCCGTTCAAAGTG
AAAGTGCTGAACGACAGCTACATCGTGGCCCTGTACGCCCTGAGCAACGA
CTTCAACAATCGGAGCGAAGTGATCAAACTGATCAACAATCAGAAGCAGT
CCCTGATCACCGTGCGCATCAACAATACCTTCAAGGACGAGCCCAAAGTG
GGCTTCAAGAATATCTACGACTGGACCTTCCTGCCTACCGACTTCGACAC
CAAAGAGGCCATCATCACAAGCTACGACGGCTGCCTGGGCCTGTTTGGCC
TGTCTATTAGCCTGGCCAGCAAGCCCACCGGCAACAACCACCTGTTTATC
CTGAGCGGCACCGACAAGTACTACAAGCTGGATCAGTTCGCCAACCACAC
CAGCATCAGCAGAAGAAGCCACCAGATCCGGTTCAGCGAGAGCGCCACAA
GCTATAGCGGCTACATCTTCCGGGACCTGTCCAACAACAACTTCAACCTG
ATCGGCACGAACATCGAGAACAGCGTGTCCGGCCACGTGTACAACGCCCT
GATCTACTACCGGTACAACTACTCCTTCGACCTGAAGCGGTGGATCTATC
TGCACAGCATCGACAAGGTGGACATCGAAGGCGGCAAGTACTATGAGCTG
GCCCCTATCGAGCTGATCTACGCCTGCAGAAGCGCCAAAGAGTTCGCCAC
ACTGCAGGACGATCTGACCGTGCTGAGATACAGCAATGAGATCGAGAACT
ACATCAACACCGTGTACTCCATCACCTACGCCGACGATCCCAACTACTTC
ATCGGAATCCAGTTCCGCAACATCCCCTATAAGTACGACGTCAAGATCCC
TCACCTGACCTTCGGCGTGCTGCACATCAGCGACAACATGGTGCCCGACG
TGATCGACATCCTGAAGATCATGAAGAATGAGCTGTTCAAGATGGACATC
ACCACCAGCTACACCTACATGCTGAGCGACGGCATCTACGTGGCCAATGT
GTCTGGCGTGCTGAGCACCTACTTCAAGATCTACAACGTGTTCTACAAGA
ACCAGATCACCTTCGGCCAGAGCCGGATGTTCATCCCTCACATCACCCTG
AGCTTTAACAACATGCGGACCGTGCGGATCGAAACCACCAAGCTGCAGAT
CAAGAGCATCTACCTCCGGAAGATCAAGGGCGACACCGTGTTCGACATGG
TGGAA

[0557] Hence, preferably the RNA construct is encoded by a DNA sequence substantially as set out in SEQ ID No: 277, or a fragment or variant thereof.

[0558] In an embodiment, the RNA sequence corresponding to the codon optimised DNA sequence of SEQ ID No: 277 is provided herein as SEQ ID No: 278, as follows:

[SEQ ID No: 278]
AUGAAGGUGCUGGCCCUGAGACAUUCUGUGGCCCAGGUGUACGCCGACAC
ACAGGUCUACGUGCACGACGACACCAAGGACAGCUACGAGAACGCCUUCC
UGAUCAGCAACCUGACCACACACAACAUCCUGUACCUGAACUACAGCAUC
AAGACCCUCGAGAUCCUGAACAAGAGCGGAAUCGCCGCUAUCGCCCUGCA
GAGCCUGGAAGAACUGUUCACCCUGAUCCGGUGCAACUUCACCUACGACU
ACGAGCUGGACAUCAUCUACCUGCACGAUUACAGCUACUACACCAACAAC
GAGAUCCGGACCGACCAGCACUGGAUCACCAAGACCAACAUCGAGGAAUA
CCUGCUGCCUGGCUGGAAGCUGACCUACGUGGGCUACAAUGGCAGCGAGA
CACGGGGCCACUACAACUUCAGCUUCAAGUGCCAGAACGCCGCCACCGAC
GACGACCUGAUCAUCGAGUACAUCUACAGCGAGGCCCUGGACUUCCAGAA
CUUCAUGCUGAAGAAAAUCAAAGAACGGAUGACCACCAGCCUGCCUAUCG
CCAGACUGAGCAACCGGGUGUUCCGGGACAAGCUGUUUCCCAGCCUGCUG
AAAGAACACAAGAACGUGGUCAACGUGGGCCCCAGAAACGAGAGCAUGUU
CACCUUUCUGAACUACCCCACCAUCAAGCAGUUCAGCAACGGCGCCUACC
UGGUCAAGGACACAAUCAAGCUGAAGCAAGAGAGAUGGCUGGGCAAGAGA
AUCAGCCAGUUCGACAUCGGCCAGUACAAGAACAUGCUGAACGUGCUGAC
CGCCAUCUACUACUACUAUAACCUGUACAAGAGCAAGCCGAUCAUCUACA
UGAUUGGCAGCGCCCCUAGCUACUGGAUCUACGACGUGCGGCACUACAGC
GACUUUUUCUUCGAAACCUGGGAUCCCCUGGACACCCCUUACAGCAGCAU
CCACCACAAAGAGCUGUUCUUCAUCAACGACGUGAAGAAGCUCAAGGACA
ACAGCAUCCUCUACAUCGACAUCAGAACCGACCGGGGCAACGCCGACUGG
AAGAAAUGGCGGAAAACCGUGGAAGAACAGACCAUCAACAACCUGGAUAU
CGCCUACGAGUACCUGCGGACCGGCAAGGCCAAAGUGUGCUGCGUGAAGA
UGACAGCCAUGGACCUGGAACUGCCCAUCAGCGCCAAACUGCUGCACCAU
CCUACCACCGAGAUCAGAAGCGAGUUCUAUCUGCUGCUGGACACCUGGGA
CCUGACCAAUAUCAGACGGUUCAUCCCCAAGGGCGUGCUGUACUCCUUUA
UCAACAACAUCAUCACCGAGAACGUGUUCAUCCAGCAGCCGUUCAAAGUG
AAAGUGCUGAACGACAGCUACAUCGUGGCCCUGUACGCCCUGAGCAACGA
CUUCAACAAUCGGAGCGAAGUGAUCAAACUGAUCAACAAUCAGAAGCAGU
CCCUGAUCACCGUGCGCAUCAACAAUACCUUCAAGGACGAGCCCAAAGUG
GGCUUCAAGAAUAUCUACGACUGGACCUUCCUGCCUACCGACUUCGACAC
CAAAGAGGCCAUCAUCACAAGCUACGACGGCUGCCUGGGCCUGUUUGGCC
UGUCUAUUAGCCUGGCCAGCAAGCCCACCGGCAACAACCACCUGUUUAUC
CUGAGCGGCACCGACAAGUACUACAAGCUGGAUCAGUUCGCCAACCACAC
CAGCAUCAGCAGAAGAAGCCACCAGAUCCGGUUCAGCGAGAGCGCCACAA
GCUAUAGCGGCUACAUCUUCCGGGACCUGUCCAACAACAACUUCAACCUG
AUCGGCACGAACAUCGAGAACAGCGUGUCCGGCCACGUGUACAACGCCCU
GAUCUACUACCGGUACAACUACUCCUUCGACCUGAAGCGGUGGAUCUAUC
UGCACAGCAUCGACAAGGUGGACAUCGAAGGCGGCAAGUACUAUGAGCUG
GCCCCUAUCGAGCUGAUCUACGCCUGCAGAAGCGCCAAAGAGUUCGCCAC
ACUGCAGGACGAUCUGACCGUGCUGAGAUACAGCAAUGAGAUCGAGAACU
ACAUCAACACCGUGUACUCCAUCACCUACGCCGACGAUCCCAACUACUUC
AUCGGAAUCCAGUUCCGCAACAUCCCCUAUAAGUACGACGUCAAGAUCCC
UCACCUGACCUUCGGCGUGCUGCACAUCAGCGACAACAUGGUGCCCGACG
UGAUCGACAUCCUGAAGAUCAUGAAGAAUGAGCUGUUCAAGAUGGACAUC
ACCACCAGCUACACCUACAUGCUGAGCGACGGCAUCUACGUGGCCAAUGU
GUCUGGCGUGCUGAGCACCUACUUCAAGAUCUACAACGUGUUCUACAAGA
ACCAGAUCACCUUCGGCCAGAGCCGGAUGUUCAUCCCUCACAUCACCCUG
AGCUUUAACAACAUGCGGACCGUGCGGAUCGAAACCACCAAGCUGCAGAU
CAAGAGCAUCUACCUCCGGAAGAUCAAGGGCGACACCGUGUUCGACAUGG
UGGAA

[0559] Hence, preferably the RNA construct comprises a sequence substantially as set out in SEQ ID No: 278, or a fragment or variant thereof.

[0560] In one embodiment, the at least one IIP is GB Virus B NS3/4A (Q69422; Genome polyprotein Hepatitis GB virus B), or an orthologue thereof. One embodiment of the polypeptide sequence of GB Virus B NS3/4A is represented herein as SEQ ID No: 279, as follows:

[SEQ ID No: 279]
APFTLQCLSERGTLSAMAVVMTGIDPRTWTGTIFRLGSLATSYMGFVCDN
VLYTAHHGSKGRRLAHPTGSIHPITVDAANDQDIYQPPCGAGSLTRCSCG
ETKGYLVTRLGSLVEVNKSDDPYWCVCGALPMAVAKGSSGAPILCSSGHV
IGMFTAARNSGGSVSQIRVRPLVCAGYHPQYTAHATLDTKPTVPNEYSVQ
ILIAPTGSGKSTKLPLSYMQEKYEVLVLNPSVATTASMPKYMHATYGVNP
NCYFNGKCTNTGASLTYSTYGMYLTGACSRNYDVIICDECHATDATTVLG
IGKVLTEAPSKNVRLVVLATATPPGVIPTPHANITEIQLTDEGTIPFHGK
KIKEENLKKGRHLIFEATKKHCDELANELARKGITAVSYYRGCDISKIPE
GDCVVVATDALCTGYTGDFDSVYDCSLMVEGTCHVDLDPTFTMGVRVCGV
SAIVKGQRRGRTGRGRAGIYYYVDGSCTPSGMVPECNIVEAFDAAKAWYG
LSSTEAQTILDTYRTQPGLPAIGANLDEWADLFSMVNPEPSFVNTAKRTA
DNYVLLTAAQLQLCHQYGYAAPNDAPRWQGARLGKKPCGVLWRLDGADAC
PGPEPSEVTRYQMCFTEVNTSGTAALAVGVGVAMAYLAIDTFGATCVRRC
WSITSVPTGATVAPVVDEEEIVEEC

[0561] Therefore, preferably the RNA construct comprises a nucleotide sequence which encodes an amino acid sequence substantially as set out in SEQ ID No: 279, or a variant or fragment thereof.

[0562] In one embodiment, the GB Virus B NS3/4A polypeptide is encoded by the DNA nucleotide sequence of SEQ ID No: 280, as follows:

[SEQ ID No: 280]
GCACCTTTTACGCTGCAGTGTCTCTCTGAACGTGGCACGCTGTCAGCGAT
GGCAGTGGTCATGACTGGTATAGACCCCCGAACTTGGACTGGAACTATCT
TCAGATTAGGATCTCTGGCCACTAGCTACATGGGATTTGTTTGTGACAAC
GTGTTGTATACTGCTCACCATGGCAGCAAGGGGCGCCGGTTGGCTCATCC
CACAGGCTCCATACACCCAATAACCGTTGACGCGGCTAATGACCAGGACA
TCTATCAACCACCATGTGGAGCTGGGTCCCTTACTCGGTGCTCTTGCGGG
GAGACCAAGGGGTATCTGGTAACACGACTGGGGTCATTGGTTGAGGTCAA
CAAATCCGATGACCCTTATTGGTGTGTGTGCGGGGCCCTTCCCATGGCTG
TTGCCAAGGGTTCTTCAGGTGCCCCGATTCTGTGCTCCTCCGGGCATGTT
ATTGGGATGTTCACCGCTGCTAGAAATTCTGGCGGTTCAGTCAGCCAGAT
TAGGGTTAGGCCGTTGGTGTGTGCTGGATACCATCCCCAGTACACAGCAC
ATGCCACTCTTGATACAAAACCTACTGTGCCTAACGAGTATTCAGTGCAA
ATTTTAATTGCCCCCACTGGCAGCGGCAAGTCAACCAAATTACCACTTTC
TTACATGCAGGAGAAGTATGAGGTCTTGGTCCTAAATCCCAGTGTGGCTA
CAACAGCATCAATGCCAAAGTACATGCACGCGACGTACGGCGTGAATCCA
AATTGCTATTTTAATGGCAAATGTACCAACACAGGGGCTTCACTTACGTA
CAGCACATATGGCATGTACCTGACCGGAGCATGTTCCCGGAACTATGACG
TCATCATTTGTGACGAATGCCATGCTACCGATGCAACCACCGTGTTGGGC
ATTGGAAAGGTTCTAACCGAAGCTCCATCCAAAAATGTTAGGCTAGTGGT
TCTTGCCACGGCTACCCCCCCTGGAGTAATCCCTACACCACATGCCAACA
TAACTGAGATTCAATTAACCGATGAAGGCACTATCCCCTTTCATGGAAAA
AAGATTAAGGAGGAAAATCTGAAGAAAGGGAGACACCTTATCTTTGAGGC
TACCAAAAAACACTGTGATGAGCTTGCTAACGAGTTAGCTCGAAAGGGAA
TAACAGCTGTCTCTTACTATAGGGGATGTGACATCTCAAAAATCCCTGAG
GGCGACTGTGTAGTAGTTGCCACTGATGCCTTGTGTACAGGGTACACTGG
TGACTTTGATTCCGTGTATGACTGCAGCCTCATGGTAGAAGGCACATGCC
ATGTTGACCTTGACCCTACTTTCACCATGGGTGTTCGTGTGTGCGGGGTC
TCAGCAATAGTTAAAGGCCAGCGTAGGGGCCGCACAGGCCGTGGGAGAGC
TGGCATATACTACTATGTAGACGGGAGTTGTACCCCTTCGGGTATGGTTC
CTGAATGCAACATTGTTGAAGCCTTCGACGCAGCCAAGGCATGGTATGGT
TTGTCATCAACAGAAGCTCAAACTATTCTGGACACCTATCGCACCCAACC
TGGGTTACCTGCGATAGGAGCAAATTTGGACGAGTGGGCTGATCTCTTTT
CTATGGTCAACCCCGAACCTTCATTTGTCAATACTGCAAAAAGAACTGCT
GACAATTATGTTTTGTTGACTGCAGCCCAACTACAACTGTGTCATCAGTA
TGGCTATGCTGCTCCCAATGACGCACCACGGTGGCAGGGAGCCCGGCTTG
GGAAAAAACCTTGTGGGGTTCTGTGGCGCTTGGACGGCGCTGACGCCTGT
CCTGGCCCAGAGCCCAGCGAGGTGACCAGATACCAAATGTGCTTCACTGA
AGTCAATACTTCTGGGACAGCCGCACTCGCTGTTGGCGTTGGAGTGGCTA
TGGCTTATCTAGCCATTGACACTTTTGGCGCCACTTGTGTGCGGCGTTGC
TGGTCTATTACATCAGTCCCTACCGGTGCTACTGTCGCCCCAGTGGTTGA
CGAAGAAGAAATCGTGGAGGAGTGT

[0563] Accordingly, preferably the GB Virus B NS3/4A polypeptide is encoded by the DNA nucleotide sequence substantially as set out in SEQ ID NO: 280, or a variant or fragment thereof.

[0564] One embodiment of codon optimised nucleic acid (DNA) encoding the GB Virus B NS3/4A polypeptide is provided herein as SEQ ID No: 281, as follows:

[SEQ ID No: 281]
GCCCCTTTCACACTGCAATGCCTGAGCGAGAGAGGCACCCTGTCTGCCAT
GGCCGTGGTTATGACAGGCATCGACCCTAGAACCTGGACCGGCACCATCT
TCAGACTGGGAAGCCTGGCCACAAGCTACATGGGCTTCGTGTGCGACAAC
GTGCTGTACACAGCCCACCACGGCAGCAAAGGCAGAAGGCTGGCTCACCC
TACAGGCAGCATTCACCCCATCACAGTGGACGCCGCCAACGACCAGGATA
TCTACCAACCTCCTTGCGGCGCTGGCAGCCTGACCAGATGTTCTTGTGGC
GAGACAAAGGGCTACCTGGTCACCAGGCTGGGATCCCTGGTGGAAGTGAA
CAAGAGCGACGACCCCTATTGGTGCGTGTGTGGCGCACTGCCTATGGCTG
TGGCCAAAGGATCTTCTGGCGCCCCTATCCTGTGTAGCTCTGGCCACGTG
ATCGGCATGTTTACCGCCGCCAGAAATAGCGGCGGCAGCGTGTCACAGAT
TAGAGTGCGGCCTCTTGTGTGCGCCGGCTATCACCCTCAGTATACAGCCC
ACGCCACACTGGACACCAAGCCTACCGTGCCTAACGAGTACAGCGTGCAG
ATCCTGATCGCCCCAACAGGCAGCGGCAAGAGCACAAAACTGCCCCTGAG
CTACATGCAAGAGAAGTACGAGGTGCTGGTGCTGAACCCTAGCGTGGCCA
CAACAGCCAGCATGCCCAAGTACATGCACGCCACCTATGGCGTGAACCCC
AACTGCTACTTCAACGGCAAGTGCACCAATACCGGCGCCAGCCTGACATA
CAGCACCTACGGCATGTATCTGACCGGCGCCTGCAGCAGAAACTACGACG
TGATCATCTGCGACGAGTGCCACGCCACCGATGCCACAACTGTGCTCGGA
ATCGGCAAGGTGCTGACAGAGGCCCCTAGCAAGAATGTGCGACTGGTGGT
GCTGGCCACTGCTACACCACCTGGCGTTATCCCTACACCTCACGCCAACA
TCACCGAGATCCAGCTGACCGACGAGGGCACAATCCCATTCCACGGCAAG
AAGATCAAAGAGGAAAACCTGAAGAAGGGCCGCCACCTGATCTTCGAGGC
CACCAAGAAACACTGTGACGAGCTGGCCAACGAACTGGCCAGAAAGGGCA
TCACCGCCGTGTCCTACTACAGAGGCTGCGACATCAGCAAGATCCCCGAG
GGCGATTGTGTGGTGGTGGCTACAGATGCCCTGTGTACCGGCTACACCGG
CGACTTCGATAGCGTGTACGACTGCAGCCTGATGGTGGAAGGCACCTGTC
ATGTGGATCTGGACCCCACCTTTACCATGGGCGTCAGAGTGTGCGGAGTG
TCCGCCATCGTGAAGGGCCAGAGAAGAGGCAGAACTGGCAGAGGCAGAGC
CGGCATCTACTACTATGTGGACGGCAGCTGTACCCCTAGCGGCATGGTGC
CTGAGTGCAACATCGTGGAAGCCTTCGATGCCGCCAAGGCTTGGTACGGC
CTGTCTAGCACAGAGGCTCAGACCATCCTGGACACCTACAGAACCCAGCC
AGGACTGCCTGCCATCGGCGCCAATCTTGATGAATGGGCCGACCTGTTCA
GCATGGTCAACCCCGAGCCTAGCTTCGTGAACACCGCCAAGAGAACCGCC
GACAACTACGTGCTGCTGACAGCCGCTCAGCTCCAGCTGTGTCACCAGTA
CGGATACGCCGCTCCTAACGACGCCCCTAGATGGCAAGGCGCTAGACTGG
GCAAGAAACCATGTGGCGTTCTGTGGCGACTGGATGGCGCTGATGCTTGT
CCTGGACCTGAGCCTAGCGAAGTGACCAGATACCAGATGTGCTTCACCGA
AGTGAATACCAGCGGCACAGCTGCCCTGGCCGTTGGTGTTGGAGTGGCCA
TGGCTTACCTGGCCATCGATACCTTTGGCGCCACATGCGTGCGGAGATGC
TGGTCTATCACCAGCGTTCCAACAGGCGCTACAGTGGCCCCTGTGGTGGA
TGAGGAAGAGATTGTGGAAGAGTGC

[0565] Hence, preferably the RNA construct is encoded by a DNA sequence substantially as set out in SEQ ID No: 281, or a fragment or variant thereof.

[0566] In an embodiment, the RNA sequence corresponding to the codon optimised DNA sequence of SEQ ID No: 281 is provided herein as SEQ ID No: 282, as follows:

[SEQ ID No: 282]
GCCCCUUUCACACUGCAAUGCCUGAGCGAGAGAGGCACCCUGUCUGCCAU
GGCCGUGGUUAUGACAGGCAUCGACCCUAGAACCUGGACCGGCACCAUCU
UCAGACUGGGAAGCCUGGCCACAAGCUACAUGGGCUUCGUGUGCGACAAC
GUGCUGUACACAGCCCACCACGGCAGCAAAGGCAGAAGGCUGGCUCACCC
UACAGGCAGCAUUCACCCCAUCACAGUGGACGCCGCCAACGACCAGGAUA
UCUACCAACCUCCUUGCGGCGCUGGCAGCCUGACCAGAUGUUCUUGUGGC
GAGACAAAGGGCUACCUGGUCACCAGGCUGGGAUCCCUGGUGGAAGUGAA
CAAGAGCGACGACCCCUAUUGGUGCGUGUGUGGCGCACUGCCUAUGGCUG
UGGCCAAAGGAUCUUCUGGCGCCCCUAUCCUGUGUAGCUCUGGCCACGUG
AUCGGCAUGUUUACCGCCGCCAGAAAUAGCGGCGGCAGCGUGUCACAGAU
UAGAGUGCGGCCUCUUGUGUGCGCCGGCUAUCACCCUCAGUAUACAGCCC
ACGCCACACUGGACACCAAGCCUACCGUGCCUAACGAGUACAGCGUGCAG
AUCCUGAUCGCCCCAACAGGCAGCGGCAAGAGCACAAAACUGCCCCUGAG
CUACAUGCAAGAGAAGUACGAGGUGCUGGUGCUGAACCCUAGCGUGGCCA
CAACAGCCAGCAUGCCCAAGUACAUGCACGCCACCUAUGGCGUGAACCCC
AACUGCUACUUCAACGGCAAGUGCACCAAUACCGGCGCCAGCCUGACAUA
CAGCACCUACGGCAUGUAUCUGACCGGCGCCUGCAGCAGAAACUACGACG
UGAUCAUCUGCGACGAGUGCCACGCCACCGAUGCCACAACUGUGCUCGGA
AUCGGCAAGGUGCUGACAGAGGCCCCUAGCAAGAAUGUGCGACUGGUGGU
GCUGGCCACUGCUACACCACCUGGCGUUAUCCCUACACCUCACGCCAACA
UCACCGAGAUCCAGCUGACCGACGAGGGCACAAUCCCAUUCCACGGCAAG
AAGAUCAAAGAGGAAAACCUGAAGAAGGGCCGCCACCUGAUCUUCGAGGC
CACCAAGAAACACUGUGACGAGCUGGCCAACGAACUGGCCAGAAAGGGCA
UCACCGCCGUGUCCUACUACAGAGGCUGCGACAUCAGCAAGAUCCCCGAG
GGCGAUUGUGUGGUGGUGGCUACAGAUGCCCUGUGUACCGGCUACACCGG
CGACUUCGAUAGCGUGUACGACUGCAGCCUGAUGGUGGAAGGCACCUGUC
AUGUGGAUCUGGACCCCACCUUUACCAUGGGCGUCAGAGUGUGCGGAGUG
UCCGCCAUCGUGAAGGGCCAGAGAAGAGGCAGAACUGGCAGAGGCAGAGC
CGGCAUCUACUACUAUGUGGACGGCAGCUGUACCCCUAGCGGCAUGGUGC
CUGAGUGCAACAUCGUGGAAGCCUUCGAUGCCGCCAAGGCUUGGUACGGC
CUGUCUAGCACAGAGGCUCAGACCAUCCUGGACACCUACAGAACCCAGCC
AGGACUGCCUGCCAUCGGCGCCAAUCUUGAUGAAUGGGCCGACCUGUUCA
GCAUGGUCAACCCCGAGCCUAGCUUCGUGAACACCGCCAAGAGAACCGCC
GACAACUACGUGCUGCUGACAGCCGCUCAGCUCCAGCUGUGUCACCAGUA
CGGAUACGCCGCUCCUAACGACGCCCCUAGAUGGCAAGGCGCUAGACUGG
GCAAGAAACCAUGUGGCGUUCUGUGGCGACUGGAUGGCGCUGAUGCUUGU
CCUGGACCUGAGCCUAGCGAAGUGACCAGAUACCAGAUGUGCUUCACCGA
AGUGAAUACCAGCGGCACAGCUGCCCUGGCCGUUGGUGUUGGAGUGGCCA
UGGCUUACCUGGCCAUCGAUACCUUUGGCGCCACAUGCGUGCGGAGAUGC
UGGUCUAUCACCAGCGUUCCAACAGGCGCUACAGUGGCCCCUGUGGUGGA
UGAGGAAGAGAUUGUGGAAGAGUGC

[0567] Hence, preferably the RNA construct comprises a sequence substantially as set out in SEQ ID No: 282, or a fragment or variant thereof.

[0568] In one embodiment, the at least one IIP is HAV 3Cpro (P08617; Genome polyprotein Human hepatitis A virus genotype IB (isolate HM175)), or an orthologue thereof. One embodiment of the polypeptide sequence of HAV 3Cpro is represented herein as SEQ ID No: 283, as follows:

[SEQ ID No: 283]
STLEIAGLVRKNLVQFGVGEKNGCVRWVMNALGVKDDWLLVPSHAYKFEK
DYEMMEFYFNRGGTYYSISAGNVVIQSLDVGFQDVVLMKVPTIPKFRDIT
QHFIKKGDVPRALNRLATLVTTVNGTPMLISEGPLKMEEKATYVHKKNDG
TTVDLTVDQAWRGKGEGLPGMCGGALVSSNQSIQNAILGIHVAGGNSILV
AKLVTQEMFQNIDKKIESQ

[0569] Therefore, preferably the RNA construct comprises a nucleotide sequence which encodes an amino acid sequence substantially as set out in SEQ ID No: 283, or a variant or fragment thereof.

[0570] In one embodiment, the HAV 3Cpro polypeptide is encoded by the DNA nucleotide sequence of SEQ ID No: 284, as follows:

[SEQ ID No: 284]
TCAACTTTGGAAATAGCAGGACTGGTTAGGAAGAACTTGGTTCAGTTTGG
AGTTGGAGAGAAGAATGGATGTGTGAGATGGGTTATGAATGCCTTGGGAG
TGAAAGATGATTGGCTGCTTGTGCCTTCCCATGCTTATAAATTTGAGAAA
GATTATGAAATGATGGAGTTTTATTTTAATAGAGGTGGAACTTACTATTC
AATTTCAGCTGGTAATGTTGTTATTCAATCTTTGGATGTGGGATTCCAGG
ATGTTGTTCTGATGAAGGTTCCTACAATTCCTAAGTTTAGAGATATTACT
CAGCATTTTATTAAGAAAGGGGATGTGCCTAGAGCTTTGAATCGCCTGGC
AACATTAGTGACAACTGTAAATGGAACCCCTATGTTAATTTCTGAGGGCC
CACTAAAGATGGAAGAGAAAGCTACTTATGTTCATAAGAAAAATGATGGT
ACAACAGTTGATTTAACTGTGGATCAGGCATGGAGAGGAAAAGGCGAAGG
TCTTCCTGGAATGTGTGGTGGGGCCTTGGTTTCATCGAATCAATCTATAC
AGAATGCAATCTTGGGCATCCATGTTGCTGGAGGAAATTCAATTCTTGTT
GCAAAATTGGTTACTCAAGAAATGTTCCAAAATATTGATAAGAAAATTGA
AAGTCAG

[0571] Accordingly, preferably the HAV 3Cpro polypeptide is encoded by the DNA nucleotide sequence substantially as set out in SEQ ID NO: 284, or a variant or fragment thereof.

[0572] One embodiment of codon optimised nucleic acid (DNA) encoding the HAV 3Cpro polypeptide is provided herein as SEQ ID No: 285, as follows:

[SEQ ID No: 285]
AGCACACTGGAAATCGCCGGACTCGTGCGGAAGAACCTGGTGCAGTTTGGCGTGGGCGAGAAGAACGGCTGTGTCAGA
TGGGTCATGAACGCCCTGGGCGTGAAGGACGATTGGCTGCTGGTTCCTAGCCACGCCTACAAGTTCGAGAAGGACTAC
GAGATGATGGAATTCTACTTCAACAGAGGCGGCACCTACTACAGCATCAGCGCCGGCAATGTGGTCATCCAGTCTCTG
GATGTGGGCTTCCAGGACGTGGTGCTGATGAAGGTGCCAACAATCCCCAAGTTCCGGGACATCACCCAGCACTTCATC
AAGAAAGGCGACGTGCCCAGGGCTCTGAACAGACTGGCTACCCTGGTCACCACCGTGAACGGCACACCCATGCTGATC
TCTGAGGGCCCACTGAAGATGGAAGAGAAGGCCACCTACGTGCACAAGAAGAACGACGGCACCACAGTGGACCTGACC
GTGGATCAAGCTTGGAGAGGCAAAGGCGAGGGCCTGCCTGGAATGTGTGGCGGAGCACTGGTGTCCAGCAACCAGAGC
ATCCAGAATGCCATCCTGGGCATCCATGTGGCTGGCGGCAATTCTATCCTGGTGGCCAAGCTGGTCACCCAAGAGATG
TTCCAGAACATCGACAAGAAGATCGAGAGCCAG

[0573] Hence, preferably the RNA construct is encoded by a DNA sequence substantially as set out in SEQ ID No: 285, or a fragment or variant thereof.

[0574] In an embodiment, the RNA sequence corresponding to the codon optimised DNA sequence of SEQ ID No: 285 is provided herein as SEQ ID No: 286, as follows:

[SEQ ID No: 286]
AGCACACUGGAAAUCGCCGGACUCGUGCGGAAGAACCUGGUGCAGUUUGGCGUGGGCGAGAAGAACGGCUGUGUCAGA
UGGGUCAUGAACGCCCUGGGCGUGAAGGACGAUUGGCUGCUGGUUCCUAGCCACGCCUACAAGUUCGAGAAGGACUAC
GAGAUGAUGGAAUUCUACUUCAACAGAGGCGGCACCUACUACAGCAUCAGCGCCGGCAAUGUGGUCAUCCAGUCUCUG
GAUGUGGGCUUCCAGGACGUGGUGCUGAUGAAGGUGCCAACAAUCCCCAAGUUCCGGGACAUCACCCAGCACUUCAUC
AAGAAAGGCGACGUGCCCAGGGCUCUGAACAGACUGGCUACCCUGGUCACCACCGUGAACGGCACACCCAUGCUGAUC
UCUGAGGGCCCACUGAAGAUGGAAGAGAAGGCCACCUACGUGCACAAGAAGAACGACGGCACCACAGUGGACCUGACC
GUGGAUCAAGCUUGGAGAGGCAAAGGCGAGGGCCUGCCUGGAAUGUGUGGCGGAGCACUGGUGUCCAGCAACCAGAGC
AUCCAGAAUGCCAUCCUGGGCAUCCAUGUGGCUGGCGGCAAUUCUAUCCUGGUGGCCAAGCUGGUCACCCAAGAGAUG
UUCCAGAACAUCGACAAGAAGAUCGAGAGCCAG

[0575] Hence, preferably the RNA construct comprises a sequence substantially as set out in SEQ ID No: 286, or a fragment or variant thereof.

[0576] In one embodiment, the at least one IIP is Human metapneumovirus M2-2 (Q6WB96; Protein M2-2 Human metapneumovirus (strain CAN97-83)), or an orthologue thereof. One embodiment of the polypeptide sequence of Human metapneumovirus M2-2 is represented herein as SEQ ID No: 287, as follows:

[SEQ ID No: 287]
MTLHMPCKTVKALIKCSEHGPVFITIEVDEMIWTQKELKEALSDGIVKS
HTNIYNCYLENIEITYVKAYLS

[0577] Therefore, preferably the RNA construct comprises a nucleotide sequence which encodes an amino acid sequence substantially as set out in SEQ ID No: 287, or a variant or fragment thereof.

[0578] In one embodiment, the Human metapneumovirus M2-2 polypeptide is encoded by the DNA nucleotide sequence of SEQ ID No: 288, as follows:

[SEQ ID No: 288]
ATGACTCTTCATATGCCCTGCAAGACAGTGAAAGCATTAATCAAGTGCAGTGAGCATGGTCCTGTTTTCATTACTATA
GAGGTTGATGAAATGATATGGACTCAAAAAGAATTAAAAGAAGCTTTGTCCGATGGGATAGTGAAGTCTCACACCAAC
ATTTACAATTGTTATTTAGAAAACATAGAAATTATATATGTCAAGGCTTACTTAAGT

[0579] Accordingly, preferably the Human metapneumovirus M2-2 polypeptide is encoded by the DNA nucleotide sequence substantially as set out in SEQ ID NO: 288, or a variant or fragment thereof.

[0580] One embodiment of codon optimised nucleic acid (DNA) encoding the Human metapneumovirus M2-2 polypeptide is provided herein as SEQ ID No: 289, as follows:

[SEQ ID No: 289]
ATGACCCTGCACATGCCCTGCAAGACAGTGAAGGCCCTGATCAAGTGTAGCGAGCACGGCCCCGTGTTCATCACCATT
GAGGTGGACGAGATGATCTGGACCCAGAAAGAGCTGAAAGAGGCCCTGAGCGACGGCATCGTGAAGTCCCACACCAAC
ATCTACAACTGCTACCTCGAGAACATCGAGATCATCTACGTGAAGGCCTACCTGAGC

[0581] Hence, preferably the RNA construct is encoded by a DNA sequence substantially as set out in SEQ ID No: 289, or a fragment or variant thereof.

[0582] In an embodiment, the RNA sequence corresponding to the codon optimised DNA sequence of SEQ ID No: 289 is provided herein as SEQ ID No: 290, as follows:

[SEQ ID No: 290]
AUGACCCUGCACAUGCCCUGCAAGACAGUGAAGGCCCUGAUCAAGUGUAGCGAGCACGGCCCCGUGUUCAUCACCAUU
GAGGUGGACGAGAUGAUCUGGACCCAGAAAGAGCUGAAAGAGGCCCUGAGCGACGGCAUCGUGAAGUCCCACACCAAC
AUCUACAACUGCUACCUCGAGAACAUCGAGAUCAUCUACGUGAAGGCCUACCUGAGC

[0583] Hence, preferably the RNA construct comprises a sequence substantially as set out in SEQ ID No: 290, or a fragment or variant thereof.

[0584] In one embodiment, the at least one IIP is Hepatitis E methyltransferase (Q9WC28; Non-structural polyprotein pORF1 Methyltransferase Hepatitis E virus genotype 1), or an orthologue thereof. One embodiment of the polypeptide sequence of Hepatitis E methyltransferase is represented herein as SEQ ID No: 291, as follows:

[SEQ ID No: 291]
EVFWNQPIQRVIHNELELYCRARSGRCLEIGAHPRSINDNPNVVHRCFLRPVGRDVQRWYTAPTRGPAANCRRSALRG
LPAADRTYCFDGFSGCSCPAETGIALYSLHDMSPSDVAEAMFRHGMTRLYAALHLPPEVLLPPGTYRTASYLLIHDGR
RVVVTYEGDTSAGYNHDVSNLRSWI

[0585] Therefore, preferably the RNA construct comprises a nucleotide sequence which encodes an amino acid sequence substantially as set out in SEQ ID No: 291, or a variant or fragment thereof.

[0586] In one embodiment, the Hepatitis E methyltransferase polypeptide is encoded by the DNA nucleotide sequence of SEQ ID No: 292, as follows:

[SEQ ID No: 292]
GAGGTTTTCTGGAATCAACCCATCCAGCGTGTCATTCATAACGAGCTGGAGCTTTACTGCCGCGCTCGCTCCGGCCGC
TGTCTTGAAATTGGCGCCCATCCCCGCTCAATAAATGATAATCCTAATGTGGTCCACCGCTGCTTCCTCCGCCCTGTT
GGGCGTGATGTTCAGCGCTGGTATACTGCTCCCACTCGCGGGCCGGCTGCTAATTGCCGCCGTTCCGCGTTGCGTGGG
CTTCCCGCTGCTGACCGCACATACTGCTTCGACGGGTTTTCTGGCTGTAGCTGCCCCGCCGAGACGGGTATCGCCCTT
TACTCCCTCCATGATATGTCACCATCTGATGTTGCCGAGGCCATGTTCCGCCATGGTATGACGCGGCTTTATGCTGCC
CTCCATCTTCCGCCTGAGGTCTTGCTGCCCCCTGGCACATATCGCACCGCATCGTATTTGCTGATTCATGACGGCAGG
CGCGTTGTGGTGACGTATGAGGGTGATACTAGTGCTGGTTACAACCACGATGTCTCCAACTTGCGCTCCTGGATT

[0587] Accordingly, preferably the Hepatitis E methyltransferase polypeptide is encoded by the DNA nucleotide sequence substantially as set out in SEQ ID NO: 292, or a variant or fragment thereof.

[0588] One embodiment of codon optimised nucleic acid (DNA) encoding the Hepatitis E methyltransferase polypeptide is provided herein as SEQ ID No: 293, as follows:

[SEQ ID No: 293]
GAGGTGTTCTGGAACCAGCCTATCCAGAGAGTGATCCACAACGAGCTGGAACTGTACTGCAGAGCCAGATCCGGCCGG
TGTCTGGAAATTGGAGCCCATCCTCGGAGCATCAACGACAACCCCAACGTGGTGCACAGATGCTTTCTGAGGCCCGTG
GGCAGAGATGTGCAGCGGTGGTATACAGCCCCTACAAGAGGACCTGCCGCCAACTGTAGAAGAAGCGCCCTGAGAGGA
CTGCCTGCCGCCGATAGAACCTACTGCTTCGATGGCTTCAGCGGCTGCAGCTGTCCTGCCGAAACTGGAATCGCCCTG
TACAGCCTGCACGACATGAGCCCATCTGATGTGGCCGAGGCCATGTTCAGACACGGCATGACCAGACTGTACGCCGCT
CTGCATCTGCCTCCAGAAGTTCTGCTGCCTCCTGGCACCTACAGAACCGCCAGCTATCTGCTGATCCACGATGGGAGA
AGAGTGGTGGTCACCTACGAGGGCGATACAAGCGCCGGCTACAACCACGACGTGTCCAACCTGAGAAGCTGGATC

[0589] Hence, preferably the RNA construct is encoded by a DNA sequence substantially as set out in SEQ ID No: 293, or a fragment or variant thereof.

[0590] In an embodiment, the RNA sequence corresponding to the codon optimised DNA sequence of SEQ ID No: 293 is provided herein as SEQ ID No: 294, as follows:

[SEQ ID No: 294]
GAGGUGUUCUGGAACCAGCCUAUCCAGAGAGUGAUCCACAACGAGCUGGAACUGUACUGCAGAGCCAGAUCCGGCCGG
UGUCUGGAAAUUGGAGCCCAUCCUCGGAGCAUCAACGACAACCCCAACGUGGUGCACAGAUGCUUUCUGAGGCCCGUG
GGCAGAGAUGUGCAGCGGUGGUAUACAGCCCCUACAAGAGGACCUGCCGCCAACUGUAGAAGAAGCGCCCUGAGAGGA
CUGCCUGCCGCCGAUAGAACCUACUGCUUCGAUGGCUUCAGCGGCUGCAGCUGUCCUGCCGAAACUGGAAUCGCCCUG
UACAGCCUGCACGACAUGAGCCCAUCUGAUGUGGCCGAGGCCAUGUUCAGACACGGCAUGACCAGACUGUACGCCGCU
CUGCAUCUGCCUCCAGAAGUUCUGCUGCCUCCUGGCACCUACAGAACCGCCAGCUAUCUGCUGAUCCACGAUGGGAGA
AGAGUGGUGGUCACCUACGAGGGCGAUACAAGCGCCGGCUACAACCACGACGUGUCCAACCUGAGAAGCUGGAUC

[0591] Hence, preferably the RNA construct comprises a sequence substantially as set out in SEQ ID No: 294, or a fragment or variant thereof.

[0592] In one embodiment, the at least one IIP is PRRV Npro (P24381; Serine/threonine-protein kinase US3 homolog Suid herpesvirus 2 (strain NIA-3) Pseudorabies Virus), or an orthologue thereof. One embodiment of the polypeptide sequence of PRRV Npro is represented herein as SEQ ID No: 295, as follows:

[SEQ ID No: 295]
MLAMWRWVTKRSRLRRGHAHLGGNKGVRGICSLYLAGLSRGLSRVHAQRSHAATMADAGIPDEILYSDISDDEIIIDG
DGDGDSSGDEDDDDGGLTRQAASRIATDLGFEVLQPLQSGSEGRVFVARRPGEADTVVLKVGQKPSTLMEGMLLKRLA
HDNVMSLKQMLARGPVTCLVLPHFRCDLYSYLTMRDGPLDMRDAGRVIRSVLRGLAYLHGMRIMHRDVKAENIFLEDV
DTVCLGDLGAARCNVAAPNFYGLAGTIETNAPEVLARDRYDTKVDVWGAGVVLFETLAYPKTIAGGDEPAINGEMHLI
DLIRALGVHPEEFPPDTRLRSEFVRYAGTHRQPYTQYARVARLGLPETGAFLIYKMLTFDPVRRPSADEILNFGMWTV

[0593] Therefore, preferably the RNA construct comprises a nucleotide sequence which encodes an amino acid sequence substantially as set out in SEQ ID No: 295, or a variant or fragment thereof.

[0594] In one embodiment, the PRRV Npro polypeptide is encoded by the DNA nucleotide sequence of SEQ ID No: 296, as follows:

[SEQ ID No: 296]
ATGCTGGCGATGTGGAGATGGGTCACCAAGAGGTCGCGGCTCCGCCGAGGCCACGCCCATCTTGGGGGAAATAAAGGA
GTCCGGGGAATTTGTTCCTTATACCTTGCCGGGCTCAGCAGGGGGTTGTCGCGCGTCCACGCCCAGCGCTCGCACGCA
GCAACAATGGCCGACGCCGGAATCCCCGACGAGATCCTGTACTCGGACATCAGCGACGACGAGATCATCATCGACGGC
GACGGCGACGGCGACAGCAGCGGGGACGAGGACGACGATGACGGGGGGCTGACGCGGCAGGCCGCGTCGCGCATCGCC
ACGGACCTGGGCTTCGAGGTGCTGCAGCCCCTGCAGTCGGGCTCGGAGGGCCGCGTCTTCGTGGCCCGCCGGCCCGGC
GAGGCGGACACGGTGGTGCTGAAGGTGGGCCAGAAGCCCTCGACGCTGATGGAGGGCATGCTGCTGAAGCGCCTGGCC
CACGATAACGTCATGAGCCTGAAGCAGATGCTCGCCCGGGGCCCGGTGACGTGCCTGGTCCTGCCGCACTTTCGGTGC
GATCTGTACAGCTACCTGACCATGCGGGACGGGCCGCTGGACATGCGCGACGCCGGGCGCGTGATCCGGTCCGTGCTC
CGCGGGCTCGCCTACCTGCACGGGATGCGCATCATGCACCGCGACGTCAAGGCGGAGAACATCTTCCTCGAGGACGTG
GACACGGTGTGCCTGGGGGACCTCGGGGCCGCGCGCTGCAACGTGGCGGCGCCCAACTTTTACGGGCTCGCCGGGACC
ATCGAGACCAACGCCCCCGAGGTGCTCGCGCGCGACCGCTACGACACCAAGGTCGACGTCTGGGGCGCGGGGGTGGTG
CTCTTCGAGACGCTGGCCTACCCCAAGACGATCGCCGGCGGGGACGAGCCCGCGATCAACGGGGAGATGCACCTGATC
GACCTCATCCGCGCCCTCGGGGTGCACCCCGAGGAGTTCCCGCCCGACACGCGCCTCCGGAGCGAGTTCGTCCGGTAC
GCCGGGACCCACCGCCAGCCGTACACGCAGTACGCGCGCGTGGCTCGCCTCGGGCTGCCCGAGACGGGGGCTTTCCTG
ATTTACAAGATGTTGACGTTTGATCCCGTCCGCCGCCCTTCCGCTGATGAGATACTCAACTTTGGAATGTGGACCGTA

[0595] Accordingly, preferably the PRRV Npro polypeptide is encoded by the DNA nucleotide sequence substantially as set out in SEQ ID NO: 296, or a variant or fragment thereof.

[0596] One embodiment of codon optimised nucleic acid (DNA) encoding the PRRV Npro polypeptide is provided herein as SEQ ID No: 297, as follows:

[SEQ ID No: 297]
ATGCTGGCCATGTGGCGCTGGGTCACCAAGAGAAGCAGACTGAGAAGAGGACACGCCCACCTCGGCGGAAACAAGGGC
GTTAGAGGCATCTGCAGCCTGTATCTGGCCGGCCTGTCTAGAGGACTGAGCAGAGTGCATGCCCAGAGATCTCACGCC
GCCACAATGGCCGATGCTGGCATCCCTGATGAGATCCTGTACAGCGACATCAGCGACGACGAGATCATCATCGATGGC
GACGGCGACGGGGATAGCAGCGGAGATGAGGATGACGATGATGGCGGCCTGACAAGACAGGCTGCCAGCAGAATTGCC
ACCGACCTGGGATTTGAGGTGCTGCAGCCTCTGCAGTCTGGCTCTGAGGGCAGAGTGTTCGTGGCTAGAAGGCCTGGC
GAAGCCGATACCGTGGTGCTGAAAGTGGGCCAGAAACCTAGCACACTGATGGAAGGCATGCTGCTGAAGAGACTGGCC
CACGACAACGTGATGAGCCTGAAGCAGATGCTGGCTAGAGGCCCTGTGACCTGTCTGGTGCTGCCTCACTTCAGATGC
GACCTGTACTCCTACCTGACCATGAGAGATGGCCCTCTGGATATGCGCGACGCCGGCAGAGTGATCAGATCTGTGCTG
AGAGGCCTGGCCTACCTGCACGGCATGAGAATCATGCACAGGGACGTGAAGGCCGAGAACATCTTTCTGGAAGATGTG
GACACCGTGTGCCTGGGCGATCTGGGAGCCGCTAGATGTAATGTGGCCGCTCCTAACTTCTACGGCCTGGCCGGAACC
ATCGAGACAAATGCCCCTGAAGTGCTGGCCCGGGACAGATACGATACCAAGGTGGACGTTTGGGGAGCCGGCGTGGTC
CTGTTTGAGACACTGGCTTACCCCAAGACAATCGCTGGCGGCGACGAGCCTGCTATCAATGGCGAGATGCACCTGATC
GACCTGATCAGAGCCCTGGGCGTGCACCCTGAGGAATTCCCTCCAGACACACGGCTGCGGAGCGAGTTCGTTAGATAC
GCCGGAACACACAGACAGCCCTACACACAGTATGCCAGAGTGGCCAGACTGGGCCTGCCTGAAACAGGCGCCTTCCTG
ATCTACAAGATGCTGACCTTCGATCCCGTGCGGAGGCCTTCTGCCGATGAGATTCTGAACTTCGGCATGTGGACCGTG

[0597] Hence, preferably the RNA construct is encoded by a DNA sequence substantially as set out in SEQ ID No: 297, or a fragment or variant thereof.

[0598] In an embodiment, the RNA sequence corresponding to the codon optimised DNA sequence of SEQ ID No: 297 is provided herein as SEQ ID No: 298, as follows:

[SEQ ID No: 298]
AUGCUGGCCAUGUGGCGCUGGGUCACCAAGAGAAGCAGACUGAGAAGAGGACACGCCCACCUCGGCGGAAACAAGGGC
GUUAGAGGCAUCUGCAGCCUGUAUCUGGCCGGCCUGUCUAGAGGACUGAGCAGAGUGCAUGCCCAGAGAUCUCACGCC
GCCACAAUGGCCGAUGCUGGCAUCCCUGAUGAGAUCCUGUACAGCGACAUCAGCGACGACGAGAUCAUCAUCGAUGGC
GACGGCGACGGGGAUAGCAGCGGAGAUGAGGAUGACGAUGAUGGCGGCCUGACAAGACAGGCUGCCAGCAGAAUUGCC
ACCGACCUGGGAUUUGAGGUGCUGCAGCCUCUGCAGUCUGGCUCUGAGGGCAGAGUGUUCGUGGCUAGAAGGCCUGGC
GAAGCCGAUACCGUGGUGCUGAAAGUGGGCCAGAAACCUAGCACACUGAUGGAAGGCAUGCUGCUGAAGAGACUGGCC
CACGACAACGUGAUGAGCCUGAAGCAGAUGCUGGCUAGAGGCCCUGUGACCUGUCUGGUGCUGCCUCACUUCAGAUGC
GACCUGUACUCCUACCUGACCAUGAGAGAUGGCCCUCUGGAUAUGCGCGACGCCGGCAGAGUGAUCAGAUCUGUGCUG
AGAGGCCUGGCCUACCUGCACGGCAUGAGAAUCAUGCACAGGGACGUGAAGGCCGAGAACAUCUUUCUGGAAGAUGUG
GACACCGUGUGCCUGGGCGAUCUGGGAGCCGCUAGAUGUAAUGUGGCCGCUCCUAACUUCUACGGCCUGGCCGGAACC
AUCGAGACAAAUGCCCCUGAAGUGCUGGCCCGGGACAGAUACGAUACCAAGGUGGACGUUUGGGGAGCCGGCGUGGUC
CUGUUUGAGACACUGGCUUACCCCAAGACAAUCGCUGGCGGCGACGAGCCUGCUAUCAAUGGCGAGAUGCACCUGAUC
GACCUGAUCAGAGCCCUGGGCGUGCACCCUGAGGAAUUCCCUCCAGACACACGGCUGCGGAGCGAGUUCGUUAGAUAC
GCCGGAACACACAGACAGCCCUACACACAGUAUGCCAGAGUGGCCAGACUGGGCCUGCCUGAAACAGGCGCCUUCCUG
AUCUACAAGAUGCUGACCUUCGAUCCCGUGCGGAGGCCUUCUGCCGAUGAGAUUCUGAACUUCGGCAUGUGGACCGUG

[0599] Hence, preferably the RNA construct comprises a sequence substantially as set out in SEQ ID No: 298, or a fragment or variant thereof.

[0600] In one embodiment, the at least one IIP is HSV1 US3 (P04413; Serine/threonine-protein kinase US3 Human herpesvirus 1 (strain 17)), or an orthologue thereof. One embodiment of the polypeptide sequence of HSV1 US3 is represented herein as SEQ ID No: 299, as follows:

[SEQ ID No: 299]
MACRKFCRVYGGQGRRKEEAVPPETKPSRVFPHGPFYTPAEDACLDSPPPETPKPSHTTPPSEAERLCHLQEILAQMY
GNQDYPIEDDPSADAADDVDEDAPDDVAYPEEYAEELFLPGDATGPLIGANDHIPPPCGASPPGIRRRSRDEIGATGF
TAEELDAMDREAARAISRGGKPPSTMAKLVTGMGFTIHGALTPGSEGCVFDSSHPDYPQRVIVKAGWYTSTSHEARLL
RRLDHPAILPLLDLHVVSGVTCLVLPKYQADLYTYLSRRLNPLGRPQIAAVSROLLSAVDYIHRQGIIHRDIKTENIF
INTPEDICLGDFGAACFVQGSRSSPFPYGIAGTIDTNAPEVLAGDPYTTTVDIWSAGLVIFETAVHNASLFSAPRGPK
RGPCDSQITRIIRQAQVHVDEFSPHPESRLTSRYRSRAAGNNRPPYTRPAWTRYYKMDIDVEYLVCKALTFDGALRPS
AAELLCLPLFQQK

[0601] Therefore, preferably the RNA construct comprises a nucleotide sequence which encodes an amino acid sequence substantially as set out in SEQ ID No: 299, or a variant or fragment thereof.

[0602] In one embodiment, the HSV1 US3 polypeptide is encoded by the DNA nucleotide sequence of SEQ ID No: 300, as follows:

[SEQ ID No: 300]
ATGGCCTGTCGTAAGTTTTGTCGCGTTTACGGGGGACAGGGCAGGAGGAAGGAGGAGGCCGTCCCGCCGGAGACAAAG
CCGTCCCGGGTGTTTCCTCATGGCCCCTTTTATACCCCAGCCGAGGACGCGTGCCTGGACTCCCCGCCCCCGGAGACC
CCCAAACCTTCCCACACCACACCACCCAGCGAGGCCGAGCGCCTGTGTCATCTGCAGGAGATCCTTGCCCAGATGTAC
GGAAACCAGGACTACCCCATAGAGGACGACCCCAGCGCGGATGCCGCGGACGATGTCGACGAGGACGCCCCGGACGAC
GTGGCCTATCCGGAGGAATACGCAGAGGAGCTTTTTCTGCCCGGGGACGCGACCGGTCCCCTTATCGGGGCCAACGAC
CACATCCCTCCCCCGTGTGGCGCATCTCCCCCCGGTATACGACGACGCAGCCGGGATGAGATTGGGGCCACGGGATTT
ACCGCGGAAGAGCTGGACGCCATGGACAGGGAGGCGGCTCGAGCCATCAGCCGCGGCGGCAAGCCCCCCTCGACCATG
GCCAAGCTGGTGACTGGCATGGGCTTTACGATCCACGGAGCGCTCACCCCAGGATCGGAGGGGTGTGTCTTTGACAGC
AGCCATCCAGATTACCCCCAACGGGTAATCGTGAAGGCGGGGTGGTACACGAGCACGAGCCACGAGGCGCGACTGCTG
AGGCGACTGGACCACCCGGCGATCCTGCCCCTCCTGGACCTGCATGTCGTCTCCGGGGTCACGTGTCTGGTCCTCCCC
AAGTACCAGGCCGACCTGTATACCTATCTGAGTAGGCGCCTGAACCCACTGGGACGCCCGCAGATCGCAGCGGTCTCC
CGGCAGCTCCTAAGCGCCGTTGACTACATTCACCGCCAGGGCATTATCCACCGCGACATTAAGACCGAAAATATTTTT
ATTAACACCCCCGAGGACATTTGCCTGGGGGACTTTGGCGCCGCGTGCTTCGTGCAGGGTTCCCGATCAAGCCCCTTC
CCCTACGGAATCGCCGGAACCATCGACACCAACGCCCCCGAGGTCCTGGCCGGGGATCCGTATACCACGACCGTCGAC
ATTTGGAGCGCCGGTCTGGTGATCTTCGAGACTGCCGTCCACAACGCGTCCTTGTTCTCGGCCCCCCGCGGCCCCAAA
AGGGGCCCGTGCGACAGTCAGATCACCCGCATCATCCGACAGGCCCAGGTCCACGTTGACGAGTTTTCCCCGCATCCA
GAATCGCGCCTCACCTCGCGCTACCGCTCCCGCGCGGCCGGGAACAATCGCCCGCCGTACACCCGACCGGCCTGGACC
CGCTACTACAAGATGGACATAGACGTCGAATATCTGGTTTGCAAAGCCCTCACCTTCGACGGCGCGCTTCGCCCCAGC
GCCGCAGAGCTGCTTTGTTTGCCGCTGTTTCAACAGAAA

[0603] Accordingly, preferably the HSV1 US3 polypeptide is encoded by the DNA nucleotide sequence substantially as set out in SEQ ID NO: 300, or a variant or fragment thereof.

[0604] One embodiment of codon optimised nucleic acid (DNA) encoding the HSV1 US3 polypeptide is provided herein as SEQ ID No: 301, as follows:

[SEQ ID No: 301]
ATGGCCTGCCGGAAGTTCTGTAGAGTGTACGGCGGACAGGGGCGCAGAAAAGAGGAAGCCGTTCCTCCTGAGACAAAG
CCCAGCAGAGTGTTCCCTCACGGCCCCTTTTACACCCCTGCCGAAGATGCCTGTCTGGACAGCCCTCCTCCAGAAACA
CCTAAGCCTAGCCACACCACACCTCCAAGCGAGGCCGAAAGACTGTGCCATCTGCAAGAGATTCTGGCCCAGATGTAC
GGCAACCAGGACTACCCCATCGAGGACGATCCATCTGCCGATGCCGCCGACGATGTGGATGAAGATGCCCCTGATGAC
GTGGCCTATCCTGAGGAATACGCCGAGGAACTGTTCCTGCCTGGCGACGCTACAGGACCTCTGATCGGAGCCAACGAT
CACATCCCTCCACCTTGTGGCGCTAGCCCTCCTGGCATCAGAAGAAGAAGCAGGGACGAGATCGGCGCCACCGGCTTT
ACAGCCGAAGAACTGGACGCCATGGACAGAGAAGCCGCCAGAGCCATTTCTAGAGGCGGCAAGCCTCCTAGCACCATG
GCCAAACTGGTTACCGGCATGGGCTTCACCATTCACGGCGCTCTGACACCTGGCTCTGAGGGCTGTGTGTTCGACAGC
TCTCACCCCGACTATCCCCAGCGCGTGATCGTGAAAGCCGGCTGGTACACAAGCACAAGCCACGAGGCCAGACTGCTG
CGGAGACTGGATCATCCTGCCATCCTGCCTCTGCTGGATCTGCATGTGGTGTCCGGCGTGACATGTCTGGTGCTGCCT
AAGTACCAGGCCGACCTGTACACCTACCTGAGCAGAAGGCTGAACCCTCTGGGCAGACCTCAGATTGCCGCTGTGTCA
AGACAGCTGCTGAGCGCTGTGGACTACATCCACAGACAGGGCATCATCCACCGGGACATCAAGACCGAGAATATCTTC
ATCAACACGCCCGAGGACATCTGCCTGGGCGATTTTGGCGCCGCTTGCTTCGTGCAAGGCAGCAGAAGCAGCCCCTTT
CCTTATGGAATCGCCGGCACCATCGACACAAACGCCCCTGAAGTTCTGGCCGGCGATCCTTACACCACCACCGTGGAT
ATTTGGAGCGCCGGACTGGTCATCTTCGAGACAGCCGTGCATAACGCCAGCCTGTTCTCTGCCCCTAGAGGCCCTAAA
AGAGGCCCCTGCGATAGCCAGATCACCCGGATCATTAGACAGGCCCAGGTGCACGTGGACGAGTTCTCTCCACATCCT
GAGAGCCGGCTGACCAGCCGGTACAGATCTAGAGCCGCCGGAAACAACCGGCCTCCATACACAAGACCTGCCTGGACA
CGGTACTACAAGATGGACATCGACGTGGAATACCTCGTGTGCAAGGCCCTGACCTTCGATGGCGCCCTTAGACCTTCT
GCCGCCGAACTGCTTTGCCTGCCACTGTTCCAGCAGAAG

[0605] Hence, preferably the RNA construct is encoded by a DNA sequence substantially as set out in SEQ ID No: 301, or a fragment or variant thereof.

[0606] In an embodiment, the RNA sequence corresponding to the codon optimised DNA sequence of SEQ ID No: 301 is provided herein as SEQ ID No: 302, as follows:

[SEQ ID No: 302]
AUGGCCUGCCGGAAGUUCUGUAGAGUGUACGGCGGACAGGGGCGCAGAAAAGAGGAAGCCGUUCCUCCUGAGACAAAG
CCCAGCAGAGUGUUCCCUCACGGCCCCUUUUACACCCCUGCCGAAGAUGCCUGUCUGGACAGCCCUCCUCCAGAAACA
CCUAAGCCUAGCCACACCACACCUCCAAGCGAGGCCGAAAGACUGUGCCAUCUGCAAGAGAUUCUGGCCCAGAUGUAC
GGCAACCAGGACUACCCCAUCGAGGACGAUCCAUCUGCCGAUGCCGCCGACGAUGUGGAUGAAGAUGCCCCUGAUGAC
GUGGCCUAUCCUGAGGAAUACGCCGAGGAACUGUUCCUGCCUGGCGACGCUACAGGACCUCUGAUCGGAGCCAACGAU
CACAUCCCUCCACCUUGUGGCGCUAGCCCUCCUGGCAUCAGAAGAAGAAGCAGGGACGAGAUCGGCGCCACCGGCUUU
ACAGCCGAAGAACUGGACGCCAUGGACAGAGAAGCCGCCAGAGCCAUUUCUAGAGGCGGCAAGCCUCCUAGCACCAUG
GCCAAACUGGUUACCGGCAUGGGCUUCACCAUUCACGGCGCUCUGACACCUGGCUCUGAGGGCUGUGUGUUCGACAGC
UCUCACCCCGACUAUCCCCAGCGCGUGAUCGUGAAAGCCGGCUGGUACACAAGCACAAGCCACGAGGCCAGACUGCUG
CGGAGACUGGAUCAUCCUGCCAUCCUGCCUCUGCUGGAUCUGCAUGUGGUGUCCGGCGUGACAUGUCUGGUGCUGCCU
AAGUACCAGGCCGACCUGUACACCUACCUGAGCAGAAGGCUGAACCCUCUGGGCAGACCUCAGAUUGCCGCUGUGUCA
AGACAGCUGCUGAGCGCUGUGGACUACAUCCACAGACAGGGCAUCAUCCACCGGGACAUCAAGACCGAGAAUAUCUUC
AUCAACACGCCCGAGGACAUCUGCCUGGGCGAUUUUGGCGCCGCUUGCUUCGUGCAAGGCAGCAGAAGCAGCCCCUUU
CCUUAUGGAAUCGCCGGCACCAUCGACACAAACGCCCCUGAAGUUCUGGCCGGCGAUCCUUACACCACCACCGUGGAU
AUUUGGAGCGCCGGACUGGUCAUCUUCGAGACAGCCGUGCAUAACGCCAGCCUGUUCUCUGCCCCUAGAGGCCCUAAA
AGAGGCCCCUGCGAUAGCCAGAUCACCCGGAUCAUUAGACAGGCCCAGGUGCACGUGGACGAGUUCUCUCCACAUCCU
GAGAGCCGGCUGACCAGCCGGUACAGAUCUAGAGCCGCCGGAAACAACCGGCCUCCAUACACAAGACCUGCCUGGACA
CGGUACUACAAGAUGGACAUCGACGUGGAAUACCUCGUGUGCAAGGCCCUGACCUUCGAUGGCGCCCUUAGACCUUCU
GCCGCCGAACUGCUUUGCCUGCCACUGUUCCAGCAGAAG

[0607] Hence, preferably the RNA construct comprises a sequence substantially as set out in SEQ ID No: 302, or a fragment or variant thereof.

[0608] In one embodiment, the at least one HP is HSV2 US1 (A0A290Y3Z3; A0A290Y3Z3 HHV2 US1 Human herpesvirus 2), or an orthologue thereof. One embodiment of the polypeptide sequence of HSV2 US1 is represented herein as SEQ ID No: 303, as follows:

[SEQ ID No: 303]
MADIPPDPPALNTTPVNHAPPSPPPGSRKRRRPVLPSSSESEGKPDTESESSSTESSEDEAGDLRGGRRRSPRELGGR
YFLDLSAESTTGTESEGTGPSDDDDDDASDGWLVDTPPRKSKRPRINLRLTSSPDRRAGVVFPEVWRNDRPIRAAQPQ
APAQSSGDRAAAPRRSARQAQMRSGAAWTLDLHYIRQCVNQLFRILRAAPNPPGSANRLRHLVRDCYLMGYCRTRLGP
RTWGRLLQISGGTWDVRLRNAIREVEARFEPAAEPVCELPCLNARRYGPECDVGNLETNGGSTSDDEISDATDSDDTL
ASHSDTEGGPSPAGRENPESASGGAIAARLECEFGTFDWTSEEGSQPWLSAVVADTSSAERSGLPAPGACRATEAPER
EDGCRKMRFPAACPYPCGHTFLRP

[0609] Therefore, preferably the RNA construct comprises a nucleotide sequence which encodes an amino acid sequence substantially as set out in SEQ ID No: 303, or a variant or fragment thereof.

[0610] In one embodiment, the HSV2 US1 polypeptide is encoded by the DNA nucleotide sequence of SEQ ID No: 304, as follows:

[SEQ ID No: 304]
ATGGCAGACATCCCCCCGGACCCGCCCGCGCTCAACACGACGCCTGTGAATCATGCTCCCCCATCCCCGCCCCCGGGT
TCACGGAAGCGCAGACGCCCCGTCCTCCCCAGCTCGTCGGAATCTGAGGGTAAGCCCGACACAGAATCGGAATCCTCC
TCGACCGAGTCGTCCGAGGATGAGGCGGGAGACCTACGCGGCGGGCGCCGTCGCTCCCCGCGGGAGCTCGGGGGGAGG
TATTTTTTGGATCTGTCGGCAGAATCGACCACGGGGACGGAATCGGAGGGAACGGGGCCGTCGGACGACGATGATGAT
GATGCGTCAGACGGCTGGTTGGTTGACACCCCCCCCCGTAAATCCAAGCGACCCCGAATCAACCTGCGATTAACGAGC
TCCCCCGACCGGCGCGCGGGTGTGGTTTTCCCCGAGGTGTGGAGAAACGACAGACCTATCCGCGCGGCGCAACCCCAG
GCCCCGGCCCAGTCTTCCGGGGATCGCGCAGCCGCACCGCGGCGCTCTGCTCGCCAGGCCCAGATGCGGAGCGGAGCC
GCCTGGACGCTTGATCTGCATTACATACGCCAGTGCGTCAACCAGCTCTTTCGGATCCTGCGTGCCGCCCCGAACCCG
CCCGGCAGCGCCAACCGCCTGCGCCACCTGGTGCGAGACTGCTACCTCATGGGCTACTGCCGGACCCGCCTGGGGCCG
CGCACGTGGGGCCGCCTGCTGCAGATCTCGGGCGGAACCTGGGACGTGCGCCTGCGAAACGCAATCCGGGAGGTCGAG
GCGCGTTTTGAACCCGCCGCCGAGCCCGTGTGCGAGCTGCCCTGTCTGAACGCCAGGCGTTACGGCCCCGAGTGTGAT
GTTGGCAATCTCGAGACCAACGGCGGCTCGACGAGCGATGATGAGATATCGGATGCGACGGACTCGGACGATACCCTC
GCGTCCCATTCCGACACGGAGGGGGGGCCCTCCCCGGCCGGCCGGGAGAACCCGGAATCCGCGTCCGGCGGGGCTATC
GCGGCTCGGCTGGAGTGTGAGTTTGGGACGTTTGACTGGACGTCCGAGGAGGGCTCCCAGCCCTGGCTGTCCGCGGTG
GTCGCCGATACCAGCTCCGCCGAACGCTCTGGCCTACCCGCCCCGGGCGCGTGTCGCGCAACGGAAGCCCCAGAACGC
GAGGACGGGTGCCGAAAAATGCGCTTCCCCGCCGCCTGCCCCTATCCCTGCGGCCACACATTTCTCCGGCCA

[0611] Accordingly, preferably the HSV2 US1 polypeptide is encoded by the DNA nucleotide sequence substantially as set out in SEQ ID NO: 304, or a variant or fragment thereof.

[0612] One embodiment of codon optimised nucleic acid (DNA) encoding the HSV2 US1 polypeptide is provided herein as SEQ ID No: 305, as follows:

[SEQ ID No: 305]
ATGGCCGACATTCCTCCTGATCCTCCAGCTCTGAACACCACACCTGTGAATCACGCCCCTCCATCTCCACCACCTGGC
AGCAGAAAGAGAAGAAGGCCTGTCCTGCCTAGCAGCAGCGAGTCTGAGGGCAAGCCTGATACAGAGAGCGAGAGCAGC
AGCACAGAGAGCAGCGAGGACGAAGCTGGCGATCTTAGAGGCGGCAGAAGAAGAAGCCCCAGAGAACTCGGCGGCAGA
TACTTCCTGGATCTGAGCGCCGAGAGCACCACCGGCACTGAATCTGAAGGCACAGGCCCCAGCGACGACGATGACGAT
GATGCCTCTGATGGCTGGCTGGTGGACACCCCTCCTAGAAAGTCCAAGCGGCCCAGAATCAACCTGCGGCTGACAAGC
TCTCCTGATCGCAGAGCTGGCGTGGTGTTCCCCGAAGTGTGGCGGAACGACAGACCTATCAGAGCCGCTCAGCCTCAG
GCTCCTGCTCAGTCTAGCGGAGATAGAGCTGCCGCTCCTAGAAGATCTGCCAGACAGGCCCAGATGAGAAGCGGAGCT
GCTTGGACACTGGACCTGCACTACATCCGGCAGTGCGTGAACCAGCTGTTCCGGATCCTTCGGGCTGCCCCTAATCCA
CCTGGCTCCGCCAATAGACTGAGACACCTTGTGCGGGACTGCTACCTGATGGGCTACTGCAGAACAAGACTGGGCCCC
AGAACATGGGGCAGACTGCTGCAAATCTCTGGCGGCACATGGGACGTGCGGCTGAGAAACGCCATTAGAGAGGTGGAA
GCCAGATTCGAGCCAGCCGCTGAGCCTGTGTGTGAACTGCCTTGTCTGAACGCTCGGAGATACGGCCCCGAGTGTGAT
GTGGGCAACCTGGAAACAAATGGCGGCAGCACCTCCGACGACGAGATCTCTGATGCCACCGACAGCGACGATACACTG
GCCAGCCACAGCGATACAGAAGGCGGACCATCTCCTGCCGGAAGAGAGAATCCTGAGTCTGCCTCTGGCGGAGCTATC
GCCGCAAGACTGGAATGCGAGTTCGGCACCTTCGACTGGACAAGCGAGGAAGGCTCTCAGCCTTGGCTGTCTGCTGTG
GTGGCCGATACCTCTAGCGCCGAAAGATCTGGACTTCCTGCTCCTGGCGCCTGCAGAGCTACAGAAGCTCCTGAAAGA
GAGGACGGCTGCAGAAAGATGCGGTTCCCTGCCGCCTGTCCTTATCCTTGCGGCCACACATTTCTGCGGCCT

[0613] Hence, preferably the RNA construct is encoded by a DNA sequence substantially as set out in SEQ ID No: 305, or a fragment or variant thereof.

[0614] In an embodiment, the RNA sequence corresponding to the codon optimised DNA sequence of SEQ ID No: 305 is provided herein as SEQ ID No: 306, as follows:

[SEQ ID No: 306]
AUGGCCGACAUUCCUCCUGAUCCUCCAGCUCUGAACACCACACCUGUGAAUCACGCCCCUCCAUCUCCACCACCUGGC
AGCAGAAAGAGAAGAAGGCCUGUCCUGCCUAGCAGCAGCGAGUCUGAGGGCAAGCCUGAUACAGAGAGCGAGAGCAGC
AGCACAGAGAGCAGCGAGGACGAAGCUGGCGAUCUUAGAGGCGGCAGAAGAAGAAGCCCCAGAGAACUCGGCGGCAGA
UACUUCCUGGAUCUGAGCGCCGAGAGCACCACCGGCACUGAAUCUGAAGGCACAGGCCCCAGCGACGACGAUGACGAU
GAUGCCUCUGAUGGCUGGCUGGUGGACACCCCUCCUAGAAAGUCCAAGCGGCCCAGAAUCAACCUGCGGCUGACAAGC
UCUCCUGAUCGCAGAGCUGGCGUGGUGUUCCCCGAAGUGUGGCGGAACGACAGACCUAUCAGAGCCGCUCAGCCUCAG
GCUCCUGCUCAGUCUAGCGGAGAUAGAGCUGCCGCUCCUAGAAGAUCUGCCAGACAGGCCCAGAUGAGAAGCGGAGCU
GCUUGGACACUGGACCUGCACUACAUCCGGCAGUGCGUGAACCAGCUGUUCCGGAUCCUUCGGGCUGCCCCUAAUCCA
CCUGGCUCCGCCAAUAGACUGAGACACCUUGUGCGGGACUGCUACCUGAUGGGCUACUGCAGAACAAGACUGGGCCCC
AGAACAUGGGGCAGACUGCUGCAAAUCUCUGGCGGCACAUGGGACGUGCGGCUGAGAAACGCCAUUAGAGAGGUGGAA
GCCAGAUUCGAGCCAGCCGCUGAGCCUGUGUGUGAACUGCCUUGUCUGAACGCUCGGAGAUACGGCCCCGAGUGUGAU
GUGGGCAACCUGGAAACAAAUGGCGGCAGCACCUCCGACGACGAGAUCUCUGAUGCCACCGACAGCGACGAUACACUG
GCCAGCCACAGCGAUACAGAAGGCGGACCAUCUCCUGCCGGAAGAGAGAAUCCUGAGUCUGCCUCUGGCGGAGCUAUC
GCCGCAAGACUGGAAUGCGAGUUCGGCACCUUCGACUGGACAAGCGAGGAAGGCUCUCAGCCUUGGCUGUCUGCUGUG
GUGGCCGAUACCUCUAGCGCCGAAAGAUCUGGACUUCCUGCUCCUGGCGCCUGCAGAGCUACAGAAGCUCCUGAAAGA
GAGGACGGCUGCAGAAAGAUGCGGUUCCCUGCCGCCUGUCCUUAUCCUUGCGGCCACACAUUUCUGCGGCCU

[0615] Hence, preferably the RNA construct comprises a sequence substantially as set out in SEQ ID No: 306, or a fragment or variant thereof.

[0616] In one embodiment, the at least one IIP is CSFV NPro (P19712; Genome polyprotein Classical swine fever virus (strain Alfort)), or an orthologue thereof. One embodiment of the polypeptide sequence of CSFV NPro is represented herein as SEQ ID No: 307, as follows:

[SEQ ID No: 307]
MELNHFELLYKTSKQKPVGVEEPVYDTAGRPLFGNPSEVHPQSTLKLPHDRGRGDIRTTLRDLPRKGDCRSGNHLGPV
SGIYIKPGPVYYQDYTGPVYHRAPLEFFDEAQFCEVTKRIGRVTGSDGKLYHIYVCVDGCILLKLAKRGTPRTLKWIR
NFTNCPLWVTSC

[0617] Therefore, preferably the RNA construct comprises a nucleotide sequence which encodes an amino acid sequence substantially as set out in SEQ ID No: 307, or a variant or fragment thereof.

[0618] In one embodiment, the CSFV NPro polypeptide is encoded by the DNA nucleotide sequence of SEQ ID No: 308, as follows:

[SEQ ID No: 308]
ATGGAGTTGAATCATTTTGAATTATTATACAAAACAAGCAAACAAAAACCAGTGGGAGTGGAGGAACCGGTGTATGAC
ACCGCGGGGAGACCACTATTTGGGAACCCAAGTGAGGTACACCCACAATCAACGCTGAAGCTGCCACACGACAGGGGG
AGAGGAGATATCAGAACAACACTGAGGGACCTACCCAGGAAAGGTGACTGTAGGAGTGGCAACCATCTAGGCCCGGTT
AGTGGGATATACATAAAGCCCGGCCCTGTCTACTATCAGGACTACACGGGCCCAGTCTATCACAGAGCTCCTTTAGAG
TTCTTTGATGAGGCCCAGTTCTGCGAGGTGACTAAGAGAATAGGCAGGGTCACGGGTAGTGATGGTAAGCTTTACCAC
ATATATGTGTGCGTCGATGGTTGCATACTGCTGAAATTAGCCAAAAGGGGCACACCCAGAACCCTAAAGTGGATTAGG
AACTTCACCAACTGTCCATTATGGGTAACCAGTTGC

[0619] Accordingly, preferably the CSFV NPro polypeptide is encoded by the DNA nucleotide sequence substantially as set out in SEQ ID NO: 308, or a variant or fragment thereof.

[0620] One embodiment of codon optimised nucleic acid (DNA) encoding the CSFV NPro polypeptide is provided herein as SEQ ID No: 309, as follows:

[SEQ ID No: 309]
ATGGAACTGAACCACTTCGAGCTGCTGTACAAGACCAGCAAGCAGAAACCCGTGGGCGTCGAGGAACCCGTGTATGAT
ACAGCTGGCAGACCCCTGTTCGGCAACCCCTCTGAAGTGCACCCTCAGAGCACACTGAAGCTGCCCCACGATAGAGGC
AGAGGCGACATCAGAACCACACTGCGGGACCTGCCTAGAAAGGGCGATTGCAGAAGCGGCAATCATCTGGGCCCTGTG
TCCGGCATCTACATCAAGCCTGGACCAGTGTACTACCAGGACTACACAGGCCCCGTGTACCACAGAGCCCCTCTGGAA
TTCTTCGACGAGGCCCAGTTCTGCGAAGTGACCAAGAGAATCGGCAGAGTGACCGGCTCCGACGGCAAGCTGTACCAC
ATCTACGTGTGCGTGGACGGCTGCATCCTGCTGAAGCTGGCCAAGAGAGGCACCCCTAGAACACTGAAGTGGATCCGG
AACTTCACCAACTGTCCTCTGTGGGTCACCAGCTGC

[0621] Hence, preferably the RNA construct is encoded by a DNA sequence substantially as set out in SEQ ID No: 309, or a fragment or variant thereof.

[0622] In an embodiment, the RNA sequence corresponding to the codon optimised DNA sequence of SEQ ID No: 309 is provided herein as SEQ ID No: 310, as follows:

[SEQ ID No: 310]
AUGGAACUGAACCACUUCGAGCUGCUGUACAAGACCAGCAAGCAGAAACCCGUGGGCGUCGAGGAACCCGUGUAUGAU
ACAGCUGGCAGACCCCUGUUCGGCAACCCCUCUGAAGUGCACCCUCAGAGCACACUGAAGCUGCCCCACGAUAGAGGC
AGAGGCGACAUCAGAACCACACUGCGGGACCUGCCUAGAAAGGGCGAUUGCAGAAGCGGCAAUCAUCUGGGCCCUGUG
UCCGGCAUCUACAUCAAGCCUGGACCAGUGUACUACCAGGACUACACAGGCCCCGUGUACCACAGAGCCCCUCUGGAA
UUCUUCGACGAGGCCCAGUUCUGCGAAGUGACCAAGAGAAUCGGCAGAGUGACCGGCUCCGACGGCAAGCUGUACCAC
AUCUACGUGUGCGUGGACGGCUGCAUCCUGCUGAAGCUGGCCAAGAGAGGCACCCCUAGAACACUGAAGUGGAUCCGG
AACUUCACCAACUGUCCUCUGUGGGUCACCAGCUGC

[0623] Hence, preferably the RNA construct comprises a sequence substantially as set out in SEQ ID No: 310, or a fragment or variant thereof.

[0624] In one embodiment, the at least one IIP is BDV Npro (A0A290YXI0; Autoprotease p20 Border disease virus), or an orthologue thereof. One embodiment of the polypeptide sequence of BDV Npro is represented herein as SEQ ID No: 311, as follows:

[SEQ ID No: 311]
MELNKFELLYKTSKQRPVGAVEPVYDSAGNPLYGERTTVHPQATLKLPHHRGVAEVITTLKDLPRKGDCRSGNHRGPV
SGIYIKPGPVIYQDYKRPVYHRAPLEQFTKVQICEATKRVGRVTGSDGKLYHLYVCMDGCILLKLASRTVNAVLKWTH
NTLDCPLWVTSC

[0625] Therefore, preferably the RNA construct comprises a nucleotide sequence which encodes an amino acid sequence substantially as set out in SEQ ID No: 311, or a variant or fragment thereof.

[0626] In one embodiment, the BDV Npro polypeptide is encoded by the DNA nucleotide sequence of SEQ ID No: 312, as follows:

[SEQ ID No: 312]
ATGGAGTTGAATAAGTTTGAACTTTTATACAAAACAAGTAAACAAAGACCAGTAGGGGCTGTTGAACCAGTTTATGAC
TCAGCGGGTAACCCCCTATATGGTGAAAGAACAACAGTACACCCGCAAGCCACTCTGAAACTACCACATCACAGGGGA
GTAGCCGAGGTGATAACAACCCTGAAGGATTTGCCCAGGAAAGGAGACTGCAGGAGTGGAAACCATCGAGGCCCAGTG
AGTGGTATATACATCAAGCCAGGTCCAGTCATATACCAGGATTACAAGAGACCGGTGTACCACAGGGCTCCTCTGGAG
CAGTTCACGAAGGTACAAATCTGTGAGGCTACGAAAAGGGTGGGGAGAGTCACTGGCAGCGATGGCAAATTGTACCAC
CTATACGTTTGCATGGATGGTTGCATATTGCTGAAACTGGCAAGCAGGACCGTGAATGCAGTGCTAAAATGGACACAT
AACACTCTGGACTGTCCACTTTGGGTTACAAGCTGC

[0627] Accordingly, preferably the BDV Npro polypeptide is encoded by the DNA nucleotide sequence substantially as set out in SEQ ID NO: 312, or a variant or fragment thereof.

[0628] One embodiment of codon optimised nucleic acid (DNA) encoding the BDV Npro polypeptide is provided herein as SEQ ID No: 313, as follows:

[SEQ ID No: 313]
ATGGAACTGAACAAGTTCGAGCTGCTGTACAAGACCAGCAAGCAGAGGCCTGTGGGAGCCGTGGAACCTGTGTATGAT
AGCGCCGGCAATCCCCTGTACGGCGAGAGAACAACAGTGCACCCTCAGGCCACACTGAAGCTGCCTCATCATAGAGGC
GTGGCCGAAGTGATCACAACCCTGAAGGACCTGCCTCGGAAGGGCGATTGCAGAAGCGGCAATCACAGAGGCCCTGTG
TCCGGCATCTACATCAAGCCCGGACCTGTGATCTACCAGGACTACAAGCGGCCCGTGTACCACAGAGCACCCCTGGAA
CAGTTCACCAAGGTGCAGATTTGCGAGGCCACCAAGCGCGTGGGAAGAGTGACAGGCTCTGACGGCAAGCTGTACCAC
CTGTACGTGTGCATGGACGGCTGCATCCTGCTGAAACTGGCCAGCAGAACCGTGAACGCCGTGCTGAAGTGGACCCAC
AACACCCTGGATTGCCCTCTGTGGGTCACCAGCTGT

[0629] Hence, preferably the RNA construct is encoded by a DNA sequence substantially as set out in SEQ ID No: 313, or a fragment or variant thereof.

[0630] In an embodiment, the RNA sequence corresponding to the codon optimised DNA sequence of SEQ ID No: 313 is provided herein as SEQ ID No: 314, as follows:

[SEQ ID No: 314]
AUGGAACUGAACAAGUUCGAGCUGCUGUACAAGACCAGCAAGCAGAGGCCUGUGGGAGCCGUGGAACCUGUGUAUGAU
AGCGCCGGCAAUCCCCUGUACGGCGAGAGAACAACAGUGCACCCUCAGGCCACACUGAAGCUGCCUCAUCAUAGAGGC
GUGGCCGAAGUGAUCACAACCCUGAAGGACCUGCCUCGGAAGGGCGAUUGCAGAAGCGGCAAUCACAGAGGCCCUGUG
UCCGGCAUCUACAUCAAGCCCGGACCUGUGAUCUACCAGGACUACAAGCGGCCCGUGUACCACAGAGCACCCCUGGAA
CAGUUCACCAAGGUGCAGAUUUGCGAGGCCACCAAGCGCGUGGGAAGAGUGACAGGCUCUGACGGCAAGCUGUACCAC
CUGUACGUGUGCAUGGACGGCUGCAUCCUGCUGAAACUGGCCAGCAGAACCGUGAACGCCGUGCUGAAGUGGACCCAC
AACACCCUGGAUUGCCCUCUGUGGGUCACCAGCUGU

[0631] Hence, preferably the RNA construct comprises a sequence substantially as set out in SEQ ID No: 314, or a fragment or variant thereof.

[0632] In one embodiment, the at least one IIP is Bovine RV NS1 (Q8JZ13; Non-structural protein 1 Bovine Rotavirus A), or an orthologue thereof. One embodiment of the polypeptide sequence of Bovine RV NS1 is represented herein as SEQ ID No: 315, as follows:

[SEQ ID No: 315]
MATFKDACYHYKKLNKLNSLVLKLGANDEWRPAPVTKYKGWCLDCCQYTN
LTYCRGCALYHVCQWCSQYNRCFLDEEPHLLRMRTFKDVVTKEDIEGLLT
MYETLFPINEKLVNKFINSVKQRKCRNEYLLEWYNHLLMPITLQALTINL
EDNVYYMFGYYDCMEHENQTPFQFVNLLEKYDKLLLDDRNFHRMSHLPVI
LQQEYALRYFSKSRFLSKGKKRLSRSDFSDNLMEDRHSPTSLMQVVRNCI
SIHIDDCEWNKACTLIVDARNYISIMNSSYTEHYSVSQRCKLFTKYKFGI
VSKLVKPNYIFSSHESCALNVHNCKWCQINNHYKVWEDFRLRKIYNNVMD
FIRALVKSNVNVGHCSSQESVYKYVPDLFLICKTEKWSEAVEMLFNYLEP
VNVNGTEYVLLDYEVNWEVRGLVMQNMDGKVPRILNMNDTKKILSAMIFD
WFDTRYMRETPMTTSTTNQLRTLNKRNELIDEYDLELSDVE

[0633] Therefore, preferably the RNA construct comprises a nucleotide sequence which encodes an amino acid sequence substantially as set out in SEQ ID No: 315, or a variant or fragment thereof.

[0634] In one embodiment, the Bovine RV NS1 polypeptide is encoded by the DNA nucleotide sequence of SEQ ID No: 316, as follows:

[SEQ ID No: 316]
ATGGCGACTTTTAAGGACGCTTGTTATCATTATAAAAAGTTGAATAAATT
AAATAGTTTAGTGCTCAAACTAGGAGCAAATGATGAATGGAGGCCAGCAC
CAGTGACAAAATATAAAGGATGGTGTTTAGATTGTTGTCAATATACAAAT
TTGACATATTGCAGAGGGTGCGCTCTATACCATGTATGTCAGTGGTGCAG
TCAGTATAACAGGTGTTTCTTAGATGAAGAACCCCATTTGCTGAGAATGC
GAACATTTAAAGATGTAGTAACAAAAGAAGATATAGAAGGACTGCTAACC
ATGTATGAAACGTTGTTTCCAATAAATGAAAAGTTAGTGAATAAATTCAT
AAACTCTGTGAAGCAGCGTAAGTGTAGGAATGAGTATTTGTTAGAATGGT
ATAACCACTTACTAATGCCAATAACATTGCAAGCATTGACTATAAATCTT
GAGGATAATGTATATTATATGTTTGGATACTATGATTGCATGGAGCATGA
AAACCAAACACCATTCCAATTTGTTAACCTACTAGAAAAATATGATAAAT
TGCTACTAGATGATAGAAATTTCCATAGAATGTCACACTTACCAGTAATA
TTGCAACAAGAGTATGCGTTGAGATATTTTTCAAAATCAAGATTTTTAAG
TAAAGGGAAGAAAAGATTGAGTAGGAGTGATTTCTCAGATAATCTTATGG
AAGATAGACATAGTCCAACATCATTAATGCAAGTGGTACGTAACTGCATC
AGTATACACATAGATGATTGTGAATGGAATAAAGCGTGTACGCTTATAGT
TGATGCTAGAAATTATATTAGTATTATGAATTCATCGTATACTGAGCATT
ACAGTGTGTCACAAAGATGTAAACTGTTCACTAAGTATAAATTTGGGATT
GTATCAAAATTGGTGAAACCGAATTACATTTTTTCTAGCCATGAATCATG
CGCATTAAACGTACACAATTGTAAATGGTGTCAGATCAATAACCATTACA
AAGTGTGGGAAGATTTTAGACTTAGGAAAATATACAATAATGTAATGGAT
TTTATCAGGGCACTTGTGAAATCGAATGTAAACGTTGGACATTGTTCATC
ACAGGAATCAGTGTATAAGTATGTACCGGATTTATTTTTAATTTGTAAAA
CGGAAAAATGGAGCGAAGCTGTCGAAATGTTATTTAATTATCTAGAACCA
GTGAACGTAAATGGAACGGAGTATGTATTATTAGACTATGAAGTGAACTG
GGAAGTGAGGGGACTAGTCATGCAAAACATGGACGGGAAAGTACCAAGAA
TTTTGAATATGAATGATACAAAGAAGATACTGAGTGCAATGATATTTGAC
TGGTTTGACACAAGATATATGAGAGAAACACCAATGACGACGTCAACAAC
AAACCAACTTCGAACACTGAACAAAAGGAATGAGCTCATAGATGAGTACG
ATTTAGAACTTTCAGATGTTGAA

[0635] Accordingly, preferably the Bovine RV NS1 polypeptide is encoded by the DNA nucleotide sequence substantially as set out in SEQ ID NO: 316, or a variant or fragment thereof.

[0636] One embodiment of codon optimised nucleic acid (DNA) encoding the Bovine RV NS1 polypeptide is provided herein as SEQ ID No: 317, as follows:

[SEQ ID No: 317]
ATGGCCACCTTCAAGGACGCCTGCTACCACTACAAGAAGCTGAACAAGCT
GAATAGCCTGGTGCTGAAGCTGGGCGCCAATGATGAATGGCGACCTGCTC
CTGTGACCAAGTACAAAGGCTGGTGCCTGGACTGCTGCCAGTACACCAAT
CTGACCTACTGCAGAGGCTGCGCCCTGTACCACGTCTGTCAGTGGTGCAG
CCAGTACAACCGGTGCTTCCTGGACGAGGAACCCCATCTGCTGCGGATGC
GGACCTTTAAGGACGTGGTCACCAAAGAGGACATCGAGGGCCTGCTGACT
ATGTACGAGACACTGTTCCCCATCAACGAGAAGCTGGTCAACAAGTTCAT
CAACAGCGTGAAGCAGCGGAAGTGCCGGAACGAGTACCTGCTGGAATGGT
ACAATCATCTGCTGATGCCCATCACACTGCAGGCCCTGACCATCAACCTG
GAAGATAACGTGTACTACATGTTCGGCTACTACGACTGCATGGAACACGA
GAATCAGACCCCTTTCCAGTTCGTGAACCTGCTCGAGAAGTACGACAAGC
TGCTGCTGGACGACCGGAACTTCCACCGGATGTCTCATCTGCCCGTGATC
CTGCAGCAAGAGTACGCCCTGCGGTACTTCAGCAAGAGCCGGTTTCTGAG
CAAGGGCAAGAAGCGGCTGAGCAGAAGCGACTTCAGCGACAACCTGATGG
AAGATCGGCACAGCCCCACCAGCCTGATGCAGGTCGTCAGAAACTGCATC
AGCATCCACATCGACGACTGTGAATGGAACAAGGCCTGCACACTGATCGT
GGACGCCCGCAACTACATCTCCATCATGAACAGCAGCTACACCGAGCACT
ACAGCGTGTCCCAGCGGTGCAAGCTGTTCACAAAGTACAAGTTCGGCATC
GTGTCCAAGCTCGTGAAGCCCAATTACATCTTCAGCAGCCACGAGAGCTG
TGCCCTGAACGTGCACAACTGCAAGTGGTGCCAGATCAACAATCACTACA
AAGTGTGGGAAGATTTCCGGCTGCGGAAGATCTACAACAACGTGATGGAC
TTCATCCGCGCTCTGGTCAAGAGCAACGTGAACGTGGGCCACTGCAGCAG
CCAAGAGTCCGTGTACAAATACGTGCCCGACCTGTTCCTGATCTGCAAGA
CCGAGAAGTGGAGCGAGGCCGTGGAAATGCTGTTCAACTACCTGGAACCT
GTGAACGTCAACGGCACCGAGTACGTCCTGCTGGACTACGAAGTGAACTG
GGAAGTGCGGGGCCTCGTGATGCAGAACATGGATGGCAAGGTGCCCCGGA
TCCTGAACATGAACGACACCAAGAAAATCCTGAGCGCCATGATCTTCGAT
TGGTTCGACACCCGGTACATGCGCGAGACACCTATGACCACCAGCACCAC
CAACCAGCTGCGGACCCTGAACAAGAGAAACGAGCTGATCGACGAGTACG
ACCTGGAACTGAGCGACGTGGAA

[0637] Hence, preferably the RNA construct is encoded by a DNA sequence substantially as set out in SEQ ID No: 317, or a fragment or variant thereof.

[0638] In an embodiment, the RNA sequence corresponding to the codon optimised DNA sequence of SEQ ID No: 317 is provided herein as SEQ ID No: 318, as follows:

[SEQ ID No: 318]
AUGGCCACCUUCAAGGACGCCUGCUACCACUACAAGAAGCUGAACAAGCU
GAAUAGCCUGGUGCUGAAGCUGGGCGCCAAUGAUGAAUGGCGACCUGCUC
CUGUGACCAAGUACAAAGGCUGGUGCCUGGACUGCUGCCAGUACACCAAU
CUGACCUACUGCAGAGGCUGCGCCCUGUACCACGUCUGUCAGUGGUGCAG
CCAGUACAACCGGUGCUUCCUGGACGAGGAACCCCAUCUGCUGCGGAUGC
GGACCUUUAAGGACGUGGUCACCAAAGAGGACAUCGAGGGCCUGCUGACU
AUGUACGAGACACUGUUCCCCAUCAACGAGAAGCUGGUCAACAAGUUCAU
CAACAGCGUGAAGCAGCGGAAGUGCCGGAACGAGUACCUGCUGGAAUGGU
ACAAUCAUCUGCUGAUGCCCAUCACACUGCAGGCCCUGACCAUCAACCUG
GAAGAUAACGUGUACUACAUGUUCGGCUACUACGACUGCAUGGAACACGA
GAAUCAGACCCCUUUCCAGUUCGUGAACCUGCUCGAGAAGUACGACAAGC
UGCUGCUGGACGACCGGAACUUCCACCGGAUGUCUCAUCUGCCCGUGAUC
CUGCAGCAAGAGUACGCCCUGCGGUACUUCAGCAAGAGCCGGUUUCUGAG
CAAGGGCAAGAAGCGGCUGAGCAGAAGCGACUUCAGCGACAACCUGAUGG
AAGAUCGGCACAGCCCCACCAGCCUGAUGCAGGUCGUCAGAAACUGCAUC
AGCAUCCACAUCGACGACUGUGAAUGGAACAAGGCCUGCACACUGAUCGU
GGACGCCCGCAACUACAUCUCCAUCAUGAACAGCAGCUACACCGAGCACU
ACAGCGUGUCCCAGCGGUGCAAGCUGUUCACAAAGUACAAGUUCGGCAUC
GUGUCCAAGCUCGUGAAGCCCAAUUACAUCUUCAGCAGCCACGAGAGCUG
UGCCCUGAACGUGCACAACUGCAAGUGGUGCCAGAUCAACAAUCACUACA
AAGUGUGGGAAGAUUUCCGGCUGCGGAAGAUCUACAACAACGUGAUGGAC
UUCAUCCGCGCUCUGGUCAAGAGCAACGUGAACGUGGGCCACUGCAGCAG
CCAAGAGUCCGUGUACAAAUACGUGCCCGACCUGUUCCUGAUCUGCAAGA
CCGAGAAGUGGAGCGAGGCCGUGGAAAUGCUGUUCAACUACCUGGAACCU
GUGAACGUCAACGGCACCGAGUACGUCCUGCUGGACUACGAAGUGAACUG
GGAAGUGCGGGGCCUCGUGAUGCAGAACAUGGAUGGCAAGGUGCCCCGGA
UCCUGAACAUGAACGACACCAAGAAAAUCCUGAGCGCCAUGAUCUUCGAU
UGGUUCGACACCCGGUACAUGCGCGAGACACCUAUGACCACCAGCACCAC
CAACCAGCUGCGGACCCUGAACAAGAGAAACGAGCUGAUCGACGAGUACG
ACCUGGAACUGAGCGACGUGGAA

[0639] Hence, preferably the RNA construct comprises a sequence substantially as set out in SEQ ID No: 318, or a fragment or variant thereof.

[0640] In one embodiment, the at least one IIP is Bovine RV NS2 (Q86505; Non-structural protein 2 Bovine Rotavirus A), or an orthologue thereof. One embodiment of the polypeptide sequence of Bovine RV NS2 is represented herein as SEQ ID No: 319, as follows:

[SEQ ID No: 319]
MAELACFCYPHLESDTYRFIPFNSLAIKCMLTAKVDKKDQDKFYNSIIYG
IAPPPQFKKRYNTNDNSRGMNYETPMFNKVAVLICEALNSIKVTQSDVAS
VLSKVISVRHLENLVLRRENHQDVLFHSKELLLRSVLIAIGHSKEIETTA
TAEGGEVVFQNAAFTMWKLTYLEHRLMPILDQNFIEYKITVNEDKPISES
HVRELIAELRWQYNKFAVITHGKGHYRVVKYSSVANHADRVYATFKSNNK
NGNVIEFNLLDQRIIWQNWYAFTSSMKQGNTLEICKKLLFQKMKRESNPF
KGLSTDRKMDEVSQIGI

[0641] Therefore, preferably the RNA construct comprises a nucleotide sequence which encodes an amino acid sequence substantially as set out in SEQ ID No: 319, or a variant or fragment thereof.

[0642] In one embodiment, the Bovine RV NS2 polypeptide is encoded by the DNA nucleotide sequence of SEQ ID No: 320, as follows:

[SEQ ID No: 320]
ATGGCTGAGCTAGCTTGCTTTTGTTATCCCCATTTGGAGAGCGATACGTA
TAGATTCATTCCATTTAACAGTTTAGCTATAAAATGTATGTTGACAGCAA
AAGTGGACAAAAAAGATCAGGATAAGTTTTACAATTCAATAATTTATGGC
ATTGCACCACCGCCACAGTTCAAAAAACGTTATAACACAAATGATAATTC
GAGAGGAATGAATTATGAAACTCCAATGTTTAATAAAGTGGCGGTATTAA
TTTGTGAAGCGTTGAATTCAATTAAAGTTACTCAATCTGATGTTGCGAGT
GTACTTTCAAAAGTAATTTCTGTAAGACATTTAGAGAATTTGGTACTGAG
AAGAGAGAACCATCAGGACGTGCTTTTCCATTCAAAAGAGTTGTTGCTGA
GATCAGTACTAATAGCTATTGGTCACTCAAAAGAAATTGAAACAACTGCC
ACTGCTGAAGGAGGGGAAGTAGTTTTTCAAAATGCAGCTTTTACAATGTG
GAAACTGACATACCTGGAGCATAGACTAATGCCAATTTTGGATCAAAATT
TTATCGAATATAAAATAACAGTGAATGAAGATAAACCAATTTCAGAATCA
CATGTAAGAGAACTCATTGCTGAATTGCGGTGGCAATACAACAAATTTGC
AGTAATTACACATGGTAAAGGTCACTACAGAGTTGTAAAATATTCATCAG
TTGCGAATCATGCAGATAGAGTTTACGCTACTTTCAAGAGCAATAATAAG
AATGGGAATGTGATAGAGTTTAATCTACTTGATCAAAGAATAATATGGCA
GAACTGGTATGCGTTTACATCCTCAATGAAACAAGGCAACACTCTTGAAA
TATGCAAGAAACTACTGTTCCAAAAGATGAAGCGAGAAAGTAATCCGTTT
AAGGGACTGTCAACTGATAGAAAGATGGATGAGGTCTCTCAAATAGGAAT
T

[0643] Accordingly, preferably the Bovine RV NS2 polypeptide is encoded by the DNA nucleotide sequence substantially as set out in SEQ ID NO: 320, or a variant or fragment thereof.

[0644] One embodiment of codon optimised nucleic acid (DNA) encoding the Bovine RV NS2 polypeptide is provided herein as SEQ ID No: 321, as follows:

[SEQ ID No: 321]
ATGGCCGAGCTGGCCTGCTTTTGTTACCCTCACCTGGAAAGCGATACCTA
CCGGTTCATCCCCTTCAACAGCCTGGCCATCAAGTGCATGCTGACCGCCA
AGGTGGACAAGAAGGACCAGGACAAGTTCTACAACAGCATCATCTACGGA
ATCGCCCCTCCACCTCAGTTCAAGAAGCGGTACAACACCAACGACAACAG
CCGGGGCATGAACTACGAGACACCCATGTTCAACAAGGTGGCCGTGCTGA
TCTGCGAGGCCCTGAACTCCATCAAAGTGACCCAGTCCGATGTGGCCAGC
GTGCTGAGCAAAGTGATCTCTGTGCGGCACCTCGAGAACCTGGTGCTGCG
GAGAGAAAACCACCAGGACGTGCTGTTCCACAGCAAAGAGCTGCTGCTGA
GATCTGTGCTGATCGCCATCGGCCACTCCAAAGAGATCGAGACAACCGCC
ACAGCCGAAGGCGGAGAGGTGGTGTTTCAGAATGCCGCCTTCACCATGTG
GAAGCTGACCTACCTGGAACACCGGCTGATGCCCATCCTGGACCAGAACT
TCATCGAGTACAAGATCACCGTGAACGAGGACAAGCCCATCAGCGAGTCT
CACGTGCGGGAACTGATTGCCGAGCTGCGGTGGCAGTACAACAAGTTCGC
CGTGATCACACACGGCAAGGGCCACTACAGAGTGGTCAAGTACAGCAGCG
TGGCCAACCACGCCGATAGAGTGTACGCCACCTTCAAGAGCAACAACAAG
AACGGCAACGTGATCGAGTTCAACCTGCTGGACCAGCGGATCATCTGGCA
GAATTGGTACGCCTTTACCAGCAGCATGAAGCAGGGCAACACCCTGGAAA
TCTGCAAGAAGCTCCTGTTCCAGAAGATGAAGAGAGAGAGCAACCCCTTC
AAGGGCCTGAGCACCGACCGGAAGATGGATGAGGTGTCCCAGATCGGCAT
C

[0645] Hence, preferably the RNA construct comprises a sequence substantially as set out in SEQ ID No: 321, or a fragment or variant thereof.

[0646] In an embodiment, the RNA sequence corresponding to the codon optimised DNA sequence of SEQ ID No: 321 is provided herein as SEQ ID No: 322, as follows:

[SEQ ID No: 322]
AUGGCCGAGCUGGCCUGCUUUUGUUACCCUCACCUGGAAAGCGAUACCUA
CCGGUUCAUCCCCUUCAACAGCCUGGCCAUCAAGUGCAUGCUGACCGCCA
AGGUGGACAAGAAGGACCAGGACAAGUUCUACAACAGCAUCAUCUACGGA
AUCGCCCCUCCACCUCAGUUCAAGAAGCGGUACAACACCAACGACAACAG
CCGGGGCAUGAACUACGAGACACCCAUGUUCAACAAGGUGGCCGUGCUGA
UCUGCGAGGCCCUGAACUCCAUCAAAGUGACCCAGUCCGAUGUGGCCAGC
GUGCUGAGCAAAGUGAUCUCUGUGCGGCACCUCGAGAACCUGGUGCUGCG
GAGAGAAAACCACCAGGACGUGCUGUUCCACAGCAAAGAGCUGCUGCUGA
GAUCUGUGCUGAUCGCCAUCGGCCACUCCAAAGAGAUCGAGACAACCGCC
ACAGCCGAAGGCGGAGAGGUGGUGUUUCAGAAUGCCGCCUUCACCAUGUG
GAAGCUGACCUACCUGGAACACCGGCUGAUGCCCAUCCUGGACCAGAACU
UCAUCGAGUACAAGAUCACCGUGAACGAGGACAAGCCCAUCAGCGAGUCU
CACGUGCGGGAACUGAUUGCCGAGCUGCGGUGGCAGUACAACAAGUUCGC
CGUGAUCACACACGGCAAGGGCCACUACAGAGUGGUCAAGUACAGCAGCG
UGGCCAACCACGCCGAUAGAGUGUACGCCACCUUCAAGAGCAACAACAAG
AACGGCAACGUGAUCGAGUUCAACCUGCUGGACCAGCGGAUCAUCUGGCA
GAAUUGGUACGCCUUUACCAGCAGCAUGAAGCAGGGCAACACCCUGGAAA
UCUGCAAGAAGCUCCUGUUCCAGAAGAUGAAGAGAGAGAGCAACCCCUUC
AAGGGCCUGAGCACCGACCGGAAGAUGGAUGAGGUGUCCCAGAUCGGCAU
C

[0647] Hence, preferably the RNA construct comprises a sequence substantially as set out in SEQ ID No: 322, or a fragment or variant thereof.

[0648] In one embodiment, the at least one IIP is PBoV NP1 (D7RF52; Non-structural protein NP-1 Porcine bocavirus 1), or an orthologue thereof. One embodiment of the polypeptide sequence of PBoV NP1 is represented herein as SEQ ID No: 323, as follows:

[SEQ ID No: 323]
MSSARSDTDTGRRGKRSRSRSRSRDRDQAPGLPPKKRDYRRRSGERGSES
SPDRSTRGSPSCSTASRTSRVTSATWRRPNDSRDGGKIWGNKNKKNKTNP
YEVFSQHMARFKPDKSYCGFYWHSCRMARKGTDYIFTEGMRDFQKRCKDN
KCEWKDVREIMFGLKKVLDQGYRNMMYHFRHTQCEKCNYWDEVYKMHLAN
VSPSETEPQELTDEEILAAAMEVDGTHE

[0649] Therefore, preferably the RNA construct comprises a nucleotide sequence which encodes an amino acid sequence substantially as set out in SEQ ID No: 323, or a variant or fragment thereof.

[0650] In one embodiment, the PBoV NP1 polypeptide is encoded by the DNA nucleotide sequence of SEQ ID No: 324, as follows:

[SEQ ID No: 324]
ATGAGCTCAGCGAGATCCGACACAGACACAGGCAGGAGAGGGAAGCGGTC
GAGGAGCCGGTCGAGGAGCCGCGACCGGGACCAAGCACCGGGGCTGCCTC
CGAAAAAAAGGGACTATCGCCGTCGGAGTGGGGAGAGAGGCTCGGAGTCC
TCACCAGATCGCTCGACGAGGGGGAGCCCATCGTGCTCCACTGCTTCGAG
AACATCCCGAGTGACTTCAGCGACATGGAGGAGACCGAATGACTCTCGGG
ACGGGGGGAAAATATGGGGAAATAAAAATAAAAAGAATAAAACAAACCCT
TACGAGGTATTCAGCCAGCACATGGCCAGGTTCAAGCCAGATAAAAGCTA
TTGTGGCTTCTACTGGCACAGCTGCCGGATGGCTCGTAAGGGCACAGATT
ATATCTTTACCGAGGGAATGAGGGATTTCCAAAAACGCTGTAAAGACAAT
AAATGTGAGTGGAAAGATGTCAGGGAGATCATGTTCGGCCTCAAAAAGGT
CTTAGATCAGGGATATAGAAATATGATGTATCACTTTAGACATACCCAGT
GTGAGAAATGTAACTACTGGGATGAAGTGTATAAAATGCACCTGGCTAAC
GTGTCTCCTTCTGAAACAGAACCGCAGGAACTGACAGACGAGGAGATATT
AGCCGCGGCCATGGAGGTCGATGGCACCCACGAA

[0651] Accordingly, preferably the PBoV NP1 polypeptide is encoded by the DNA nucleotide sequence substantially as set out in SEQ ID NO: 324, or a variant or fragment thereof.

[0652] One embodiment of codon optimised nucleic acid (DNA) encoding the PBoV NP1 polypeptide is provided herein as SEQ ID No: 325, as follows:

[SEQ ID No: 325]
ATGAGCAGCGCCAGAAGCGATACCGACACAGGCAGACGGGGCAAGAGAAG
CAGAAGCCGGTCCAGAAGCAGAGACAGAGATCAGGCTCCTGGCCTGCCTC
CTAAGAAGCGGGACTACAGAAGAAGATCCGGCGAGAGAGGCAGCGAGAGC
AGCCCTGATAGAAGCACAAGAGGCAGCCCTAGCTGTAGCACCGCCAGCAG
AACAAGCAGAGTGACCTCTGCCACTTGGCGGAGGCCCAACGATTCTAGAG
ATGGCGGCAAGATCTGGGGCAACAAGAACAAGAAGAACAAAACGAACCCC
TACGAGGTGTTCAGCCAGCACATGGCCAGATTCAAGCCCGACAAGAGCTA
CTGCGGCTTCTACTGGCACAGCTGCCGGATGGCCAGAAAGGGCACCGACT
ACATCTTCACCGAGGGCATGAGAGACTTCCAGAAGCGGTGCAAGGACAAC
AAGTGCGAGTGGAAGGACGTGCGCGAGATCATGTTCGGCCTGAAGAAGGT
GCTGGACCAGGGCTACAGAAACATGATGTACCACTTCCGGCACACCCAGT
GCGAGAAGTGCAACTACTGGGACGAAGTGTACAAGATGCACCTGGCCAAC
GTGTCCCCATCCGAGACAGAGCCTCAAGAGCTGACCGACGAGGAAATTCT
GGCCGCTGCCATGGAAGTGGATGGCACACATGAA

[0653] Hence, preferably the RNA construct is encoded by a DNA sequence substantially as set out in SEQ ID No: 325, or a fragment or variant thereof.

[0654] In an embodiment, the RNA sequence corresponding to the codon optimised DNA sequence of SEQ ID No: 325 is provided herein as SEQ ID No: 326, as follows:

[SEQ ID No: 326]
AUGAGCAGCGCCAGAAGCGAUACCGACACAGGCAGACGGGGCAAGAGAAG
CAGAAGCCGGUCCAGAAGCAGAGACAGAGAUCAGGCUCCUGGCCUGCCUC
CUAAGAAGCGGGACUACAGAAGAAGAUCCGGCGAGAGAGGCAGCGAGAGC
AGCCCUGAUAGAAGCACAAGAGGCAGCCCUAGCUGUAGCACCGCCAGCAG
AACAAGCAGAGUGACCUCUGCCACUUGGCGGAGGCCCAACGAUUCUAGAG
AUGGCGGCAAGAUCUGGGGCAACAAGAACAAGAAGAACAAAACGAACCCC
UACGAGGUGUUCAGCCAGCACAUGGCCAGAUUCAAGCCCGACAAGAGCUA
CUGCGGCUUCUACUGGCACAGCUGCCGGAUGGCCAGAAAGGGCACCGACU
ACAUCUUCACCGAGGGCAUGAGAGACUUCCAGAAGCGGUGCAAGGACAAC
AAGUGCGAGUGGAAGGACGUGCGCGAGAUCAUGUUCGGCCUGAAGAAGGU
GCUGGACCAGGGCUACAGAAACAUGAUGUACCACUUCCGGCACACCCAGU
GCGAGAAGUGCAACUACUGGGACGAAGUGUACAAGAUGCACCUGGCCAAC
GUGUCCCCAUCCGAGACAGAGCCUCAAGAGCUGACCGACGAGGAAAUUCU
GGCCGCUGCCAUGGAAGUGGAUGGCACACAUGAA

[0655] Hence, preferably the RNA construct comprises a sequence substantially as set out in SEQ ID No: 326, or a fragment or variant thereof.

[0656] In one embodiment, the at least one IIP is Hepatitis E Orf3 (P69616; Protein ORF3 Hepatitis E virus genotype 1), or an orthologue thereof. One embodiment of the polypeptide sequence of Hepatitis E Orf3 is represented herein as SEQ ID No: 327, as follows:

[SEQ ID No: 327]
MGSRPCALGLFCCCSSCFCLCCPRHRPVSRLAAVVGGAAAVPAVVSGVTG
LILSPSQSPIFIQPTPSPPMSPLRPGLDLVFANPPDHSAPLGVTRPSAPP
LPHVVDLPQLGPRR

[0657] Therefore, preferably the RNA construct comprises a nucleotide sequence which encodes an amino acid sequence substantially as set out in SEQ ID No: 327, or a variant or fragment thereof.

[0658] In one embodiment, the Hepatitis E Orf3 polypeptide is encoded by the DNA nucleotide sequence of SEQ ID No: 328, as follows:

[SEQ ID No: 328]
ATGGGTTCGCGACCATGCGCCCTCGGCCTATTTTGTTGCTGCTCCTCATG
TTTTTGCCTATGCTGCCCGCGCCACCGCCCGGTCAGCCGTCTGGCCGCCG
TCGTGGGCGGCGCAGCGGCGGTTCCGGCGGTGGTTTCTGGGGTGACCGGG
TTGATTCTCAGCCCTTCGCAATCCCCTATATTCATCCAACCAACCCCTTC
GCCCCCGATGTCACCGCTGCGGCCGGGGCTGGACCTCGTGTTCGCCAACC
CGCCCGACCACTCGGCTCCGCTTGGCGTGACCAGGCCCAGCGCCCCGCCG
TTGCCTCACGTCGTAGACCTACCACAGCTGGGGCCGCGCCGC

[0659] Accordingly, preferably the Hepatitis E Orf3 polypeptide is encoded by the DNA nucleotide sequence substantially as set out in SEQ ID NO: 328, or a variant or fragment thereof.

[0660] One embodiment of codon optimised nucleic acid (DNA) encoding the Hepatitis E Orf3 polypeptide is provided herein as SEQ ID No: 329, as follows:

[SEQ ID No: 329]
ATGGGCAGCAGACCTTGTGCTCTGGGCCTGTTCTGCTGCTGCAGCTCCTG
CTTCTGCCTGTGCTGCCCTAGACACAGACCCGTGTCTAGACTGGCCGCTG
TTGTTGGCGGAGCTGCTGCTGTTCCAGCTGTGGTGTCTGGCGTGACAGGC
CTGATTCTGAGCCCTTCTCAGAGCCCCATCTTCATCCAGCCTACACCTAG
TCCTCCAATGAGCCCTCTGAGGCCTGGACTGGATCTGGTGTTCGCCAATC
CTCCTGATCACTCTGCCCCTCTGGGCGTGACAAGACCTTCTGCTCCTCCT
CTGCCACACGTGGTGGATCTGCCTCAACTGGGCCCTAGAAGA

[0661] Hence, preferably the RNA construct is encoded by a DNA sequence substantially as set out in SEQ ID No: 329, or a fragment or variant thereof.

[0662] In an embodiment, the RNA sequence corresponding to the codon optimised DNA sequence of SEQ ID No: 329 is provided herein as SEQ ID No: 330, as follows:

[SEQ ID No: 330]
AUGGGCAGCAGACCUUGUGCUCUGGGCCUGUUCUGCUGCUGCAGCUCCUG
CUUCUGCCUGUGCUGCCCUAGACACAGACCCGUGUCUAGACUGGCCGCUG
UUGUUGGCGGAGCUGCUGCUGUUCCAGCUGUGGUGUCUGGCGUGACAGGC
CUGAUUCUGAGCCCUUCUCAGAGCCCCAUCUUCAUCCAGCCUACACCUAG
UCCUCCAAUGAGCCCUCUGAGGCCUGGACUGGAUCUGGUGUUCGCCAAUC
CUCCUGAUCACUCUGCCCCUCUGGGCGUGACAAGACCUUCUGCUCCUCCU
CUGCCACACGUGGUGGAUCUGCCUCAACUGGGCCCUAGAAGA

[0663] Hence, preferably the RNA construct comprises a sequence substantially as set out in SEQ ID No: 330, or a fragment or variant thereof.

[0664] In one embodiment, the at least one IIP is Rotavirus NSP1 (Q99FX5; Non-structural protein 1 Rotavirus A (strain RVA/SA11-4F/G3P6[1])), or an orthologue thereof. Barro M, Patton J T (2007) Rotavirus NSP1 inhibits expression of type 1 interferon by antagonising the function of interferon regulatory factors IRF3, IRF5 and IRF7. J Virol, 81, 9, 4473-4481. This IIP is believed to induce degradation of IRF7. One embodiment of the polypeptide sequence of Rotavirus NSP1 is represented herein as SEQ ID No: 331, as follows:

[SEQ ID No: 331]
MATFKDACFHYRRLTALNRRLCNIGANSICMPVPDAKIKGWCLECCQIAD
LTHCYGCSLPHVCKWCVQNRRCFLDNEPHLLKLRTVKHPITKDKLQCIID
LYNIIFPINDKVIRKFERMIKQRKCRNQYKIEWYNHLLLPITLNAAAFKF
DENNLYYVFGLYEKSVSDIYAPYRIVNFINEFDKLLLDDINFTRMSNLPI
ELRNHYAKKYFQLSRLPSSKLKQIYFSDFTKETVIFNTYTKTPGRSIYRN
VTEFNWRDELELYSDLKNDKNKLIAAMMTSKYTRFYAHDNNFGRLKMTIF
ELGHHCQPNYVASNHPGNASDIQYCKWCNIKYFLSKIDWRIRDMYNLLME
FIKDCYKSNVNVGHCSSVENIYPLIKRLIWSLFTNHMDQTIEEVFNHMSP
VSVEGTNVIMLILGLNISLYNEIKRTLNVDSIPMVLNLNEFSSIVKSISS
KWYNVDELDKLPMSIKSTEELIEMKNSGTLTEEFELLISNSEDDNE

[0665] Therefore, preferably the RNA construct comprises a nucleotide sequence which encodes an amino acid sequence substantially as set out in SEQ ID No: 331, or a variant or fragment thereof.

[0666] In one embodiment, the Rotavirus NSP1 polypeptide is encoded by the DNA nucleotide sequence of SEQ ID No: 332, as follows:

[SEQ ID No: 332]
ATGGCTACTTTTAAAGATGCATGCTTTCATTATCGTAGATTAACTGCTTT
AAATCGGAGATTATGCAACATTGGTGCAAATTCTATTTGCATGCCAGTTC
CTGATGCGAAGATTAAGGGGTGGTGTTTAGAATGTTGTCAAATAGCTGAT
TTAACCCATTGTTATGGTTGCTCATTGCCGCATGTTTGCAAATGGTGTGT
TCAGAACAGAAGATGCTTCCTTGACAATGAACCTCATTTGCTTAAGCTTA
GAACTGTGAAACATCCAATTACCAAAGACAAATTACAGTGTATCATAGAC
TTGTACAATATAATATTTCCAATTAATGATAAAGTAATTAGAAAATTTGA
AAGAATGATAAAGCAAAGAAAATGTAGGAATCAATATAAAATTGAATGGT
ATAATCATTTGCTGCTCCCAATTACATTAAATGCTGCTGCATTTAAGTTT
GATGAAAATAATCTTTATTATGTTTTTGGGTTATATGAGAAATCAGTCAG
TGATATATATGCTCCATATAGAATTGTTAACTTTATAAATGAATTTGATA
AATTATTGCTTGATGATATTAACTTTACAAGAATGTCCAATCTACCAATA
GAGTTGAGAAACCATTATGCAAAGAAATACTTCCAATTATCAAGACTGCC
ATCATCAAAACTAAAGCAAATTTACTTTTCAGATTTTACTAAAGAAACTG
TGATTTTTAATACTTATACAAAAACGCCAGGAAGATCAATATACAGAAAT
GTAACTGAATTTAATTGGAGAGATGAATTGGAGCTTTATTCTGATTTAAA
AAATGATAAGAATAAATTAATTGCTGCAATGATGACGAGTAAGTATACTC
GGTTCTATGCTCATGATAATAATTTTGGAAGGTTGAAAATGACAATATTT
GAGTTGGGACATCATTGTCAGCCTAACTACGTGGCATCTAATCACCCAGG
CAATGCTTCCGATATCCAGTACTGTAAATGGTGTAATATAAAATATTTTC
TTAGTAAAATTGATTGGCGGATTCGTGATATGTATAATTTATTGATGGAA
TTTATTAAGGATTGTTATAAAAGTAATGTTAACGTTGGACATTGTAGTTC
TGTTGAAAACATATATCCTTTAATTAAAAGATTAATTTGGAGTTTGTTTA
CTAATCACATGGATCAAACAATTGAAGAAGTGTTTAATCACATGTCGCCA
GTGTCAGTTGAAGGTACGAATGTCATCATGTTGATTCTTGGATTGAATAT
TAGTTTGTATAATGAAATTAAGCGCACTTTGAATGTAGATAGCATACCAA
TGGTACTTAATTTAAATGAATTCAGTGAGGAACTGATTGAAATGAAGAAT
TCTGGAACTTTAACTGAAGAATTTGAGCTACTGATCTCCAACTCAGAAGA
TGACAATGAG

[0667] Accordingly, preferably the Rotavirus NSP1 polypeptide is encoded by the DNA nucleotide sequence substantially as set out in SEQ ID NO: 332, or a variant or fragment thereof.

[0668] One embodiment of codon optimised nucleic acid (DNA) encoding the Rotavirus NSP1 polypeptide is provided herein as SEQ ID No: 333, as follows:

[SEQ ID No: 333]
ATGGCCACCTTCAAGGACGCCTGCTTCCACTACAGACGGCTGACAGCCCT
GAATCGGCGGCTGTGTAATATCGGCGCCAACAGCATCTGCATGCCCGTGC
CTGACGCCAAGATCAAAGGCTGGTGCCTGGAATGCTGCCAGATCGCCGAT
CTCACCCACTGCTACGGCTGTTCTCTGCCCCATGTGTGCAAGTGGTGCGT
GCAGAACAGACGGTGCTTCCTGGACAACGAGCCCCATCTGCTGAAGCTGA
GAACCGTGAAGCACCCCATCACCAAGGACAAGCTGCAGTGCATCATCGAC
CTGTACAACATCATCTTCCCCATCAACGACAAAGTGATCCGGAAGTTCGA
GCGGATGATCAAGCAGCGGAAGTGCCGGAACCAGTACAAGATCGAGTGGT
ACAATCATCTGCTGCTGCCCATCACACTGAACGCCGCTGCCTTCAAGTTC
GACGAGAACAACCTGTACTACGTGTTCGGCCTGTACGAGAAGTCCGTGTC
CGACATCTACGCCCCTTACCGGATCGTGAACTTCATCAACGAGTTCGATA
AGCTGCTGCTGGACGACATCAACTTCACCCGGATGAGCAACCTGCCTATC
GAGCTGAGAAACCACTACGCCAAGAAGTACTTTCAGCTGAGCAGACTGCC
CAGCAGCAAGCTGAAGCAGATCTACTTCTCCGACTTCACCAAAGAAACCG
TGATCTTCAACACCTACACCAAGACACCCGGCAGATCCATCTACCGGAAC
GTGACCGAGTTCAACTGGCGGGACGAGCTGGAACTGTACAGCGACCTGAA
GAACGACAAGAACAAGCTGATCGCCGCCATGATGACCAGCAAGTACACCC
GGTTCTACGCCCACGACAACAATTTCGGCCGGCTGAAGATGACCATCTTC
GAGCTGGGCCACCACTGCCAGCCTAATTACGTGGCCTGGCGGATCCGGGA
CATGTACAACCTGCTGATGGAATTCATCAAGGACTGCTACAAGAGCAACG
TGAACGTGGGCCACTGCAGCAGCGTCGAGAACATCTACCCTCTGATCAAG
CGGCTGATCTGGTCCCTGTTCACCAACCACATGGACCAGACCATCGAAGA
GGTGTTCAATCACATGAGCCCCGTGTCCGTGGAAGGCACCAACGTGATCA
TGCTGATCCTGGGCCTGAACATCAGCCTGTACAATGAGATCAAGCGCACC
CTGAACGTGGACAGCATCCCCATGGTGCTGAACCTGAACGAGTTCAGCAG
CATCGTGAAGTCCATCTCCAGCAAGTGGTATAACGTGGACGAACTGGACA
AACTGCCCATGAGCATCAAGTCCACCGAGGAACTGATCGAGATGAAGAAC
AGCGGCACCCTGACCGAGGAATTCGAGCTGCTGATCTCCAACAGCGAGGA
CGACAACGAG

[0669] Hence, preferably the RNA construct is encoded by a DNA sequence substantially as set out in SEQ ID No: 333, or a fragment or variant thereof.

[0670] In an embodiment, the RNA sequence corresponding to the codon optimised DNA sequence of SEQ ID No: 333 is provided herein as SEQ ID No: 334, as follows:

[SEQ ID No: 334]
AUGGCCACCUUCAAGGACGCCUGCUUCCACUACAGACGGCUGACAGCCCU
GAAUCGGCGGCUGUGUAAUAUCGGCGCCAACAGCAUCUGCAUGCCCGUGC
CUGACGCCAAGAUCAAAGGCUGGUGCCUGGAAUGCUGCCAGAUCGCCGAU
CUCACCCACUGCUACGGCUGUUCUCUGCCCCAUGUGUGCAAGUGGUGCGU
GCAGAACAGACGGUGCUUCCUGGACAACGAGCCCCAUCUGCUGAAGCUGA
GAACCGUGAAGCACCCCAUCACCAAGGACAAGCUGCAGUGCAUCAUCGAC
CUGUACAACAUCAUCUUCCCCAUCAACGACAAAGUGAUCCGGAAGUUCGA
GCGGAUGAUCAAGCAGCGGAAGUGCCGGAACCAGUACAAGAUCGAGUGGU
ACAAUCAUCUGCUGCUGCCCAUCACACUGAACGCCGCUGCCUUCAAGUUC
GACGAGAACAACCUGUACUACGUGUUCGGCCUGUACGAGAAGUCCGUGUC
CGACAUCUACGCCCCUUACCGGAUCGUGAACUUCAUCAACGAGUUCGAUA
AGCUGCUGCUGGACGACAUCAACUUCACCCGGAUGAGCAACCUGCCUAUC
GAGCUGAGAAACCACUACGCCAAGAAGUACUUUCAGCUGAGCAGACUGCC
CAGCAGCAAGCUGAAGCAGAUCUACUUCUCCGACUUCACCAAAGAAACCG
UGAUCUUCAACACCUACACCAAGACACCCGGCAGAUCCAUCUACCGGAAC
GUGACCGAGUUCAACUGGCGGGACGAGCUGGAACUGUACAGCGACCUGAA
GAACGACAAGAACAAGCUGAUCGCCGCCAUGAUGACCAGCAAGUACACCC
GGUUCUACGCCCACGACAACAAUUUCGGCCGGCUGAAGAUGACCAUCUUC
GAGCUGGGCCACCACUGCCAGCCUAAUUACGUGGCCUCUAAUCACCCCGG
CAACGCCAGCGAUAUCCAGUACUGCAAAUGGUGCAAUAUCAAGUACUUCC
UGAGCAAGAUCGACUGGCGGAUCCGGGACAUGUACAACCUGCUGAUGGAA
UUCAUCAAGGACUGCUACAAGAGCAACGUGAACGUGGGCCACUGCAGCAG
CGUCGAGAACAUCUACCCUCUGAUCAAGCGGCUGAUCUGGUCCCUGUUCA
CCAACCACAUGGACCAGACCAUCGAAGAGGUGUUCAAUCACAUGAGCCCC
GUGUCCGUGGAAGGCACCAACGUGAUCAUGCUGAUCCUGGGCCUGAACAU
CAGCCUGUACAAUGAGAUCAAGCGCACCCUGAACGUGGACAGCAUCCCCA
UGGUGCUGAACCUGAACGAGUUCAGCAGCAUCGUGAAGUCCAUCUCCAGC
AAGUGGUAUAACGUGGACGAACUGGACAAACUGCCCAUGAGCAUCAAGUC
CACCGAGGAACUGAUCGAGAUGAAGAACAGCGGCACCCUGACCGAGGAAU
UCGAGCUGCUGAUCUCCAACAGCGAGGACGACAACGAG

[0671] Hence, preferably the RNA construct comprises a sequence substantially as set out in SEQ ID No: 334, or a fragment or variant thereof.

[0672] In one embodiment, the at least one IIP is KSHV ORF45 (Q77UV9; HHV8 ORF 45 Human herpesvirus 8 OX), or an orthologue thereof. One embodiment of the polypeptide sequence of KSHV ORF45 is represented herein as SEQ ID No: 335, as follows:

[SEQ ID No: 335]
MAMFVRTSSSTHDEERMLPIEGAPRRRPPVKFIFPPPPLSSLPGFGRPRG
YAGPTVIDMSAPDDVFAEDTPSPPATPLDLQISPDQSSGESEYDEDEEDE
DEEENDDVQEEDEPEGYPADFFQPLSHLRPRPLARRAHTPKPVAVVAGRV
RSSTDTAESEASMGWVSQDDGFSPAGLSPSDDEGVAILEPMAAYTGTGAY
GLSPASRNSVPGTQSSPYSDPDEGPSWRPLRAAPTAIVDLTSDSDSDDSS
NSPDVNNEAAFTDARHFSHQPPSSEEDGEDQGEVLSQRIGLMDVGQKRKR
QSTASSGSEDVVRCQRQPNLSRKAVASVIIISSGSDTDEEPSSAVSVIVS
PSSTKGHLPTQSPSTSAHSISSGSTTTAGSRCSDPTRILASTPPLCGNGA
YNWPWLD

[0673] Therefore, preferably the RNA construct comprises a nucleotide sequence which encodes an amino acid sequence substantially as set out in SEQ ID No: 335, or a variant or fragment thereof.

[0674] In one embodiment, the KSHV ORF45 polypeptide is encoded by the DNA nucleotide sequence of SEQ ID No: 336, as follows:

[SEQ ID No: 336]
CGACCCCCCGTGAAGTTCATATTCCCACCTCCACCTCTTTCATCACTTCC
AGGATTTGGCAGGCCGCGCGGCTATGCTGGACCCACGGTGATAGATATGT
CTGCCCCAGACGACGTCTTCGCCGAGGACACGCCATCGCCGCCAGCAACC
CCTCTGGATCTACAGATATCCCCGGATCAGTCGAGCGGCGAATCTGAATA
TGACGAGGATGAGGAAGATGAAGATGAAGAAGAAAATGACGATGTTCAGG
AGGAAGACGAGCCAGAGGGGTACCCTGCAGACTTTTTTCAACCTTTATCT
CACTTGCGCCCGAGGCCTCTGGCCAGACGGGCCCATACGCCCAAACCGGT
AGCAGTGGTAGCGGGCCGCGTGCGCAGTTCAACGGACACGGCGGAGTCCG
AGGCGTCCATGGGATGGGTTAGTCAGGATGACGGATTTTCCCCTGCTGGG
CTCTCACCTTCAGACGACGAGGGGGTTGCTATCCTGGAACCGATGGCGGC
ATACACTGGGACCGGGGCATACGGACTTTCACCTGCTTCCAGAAATAGTG
TACCTGGAACACAAAGTTCACCATACAGCGACCCTGATGAAGGGCCCTCG
TGGCGCCCCCTGCGCGCCGCACCCACCGCGATCGTCGACCTGACATCGGA
CTCTGATAGCGATGACAGTTCCAACTCTCCGGACGTGAACAATGAGGCCG
CGTTTACCGACGCGCGCCATTTTTCCCACCAGCCACCCTCGTCCGAGGAG
GACGGAGAAGACCAAGGGGAAGTATTGAGTCAGAGAATCGGGCTCATGGA
CGTGGGCCAGAAGCGCAAAAGGCAGTCTACCGCCTCCTCIGGTAGCGAGG
ATGTGGTGCGCTGCCAGAGACAACCAAACTTAAGCCGCAAAGCAGTGGCG
TCTGTGATAATTATATCCTCGGGGAGTGACACAGACGAGGAGCCCTCGTC
CGCCGTGAGCGTGATCGTGTCTCCGTCGAGCACAAAGGGTCACCTCCCAA
CCCAATCTCCCAGTACTTCCGCCCACTCGATTTCATCAGGAAGCACAACT
ACCGCGGGGTCCAGGTGCAGCGACCCAACCCGCATCCTGGCCTCCACGCC
ACCCCTGTGTGGAAACGGTGCATATAACTGGCCGTGGCTGGAC

[0675] Accordingly, preferably the KSHV ORF45 polypeptide is encoded by the DNA nucleotide sequence substantially as set out in SEQ ID NO: 336, or a variant or fragment thereof.

[0676] One embodiment of codon optimised nucleic acid (DNA) encoding the KSHV ORF45 polypeptide is provided herein as SEQ ID No: 337, as follows:

[SEQ ID No: 337]
ATGGCCATGTTTGTGCGGACCAGCAGCAGCACCCACGACGAGGAAAGAAT
GCTGCCTATCGAGGGCGCTCCTCGGAGAAGGCCTCCTGTGAAGTTCATCT
TCCCACCTCCACCACTGAGCAGCCTGCCTGGATTTGGCAGACCTAGAGGC
TACGCCGGACCTACCGTGATCGATATGAGCGCCCCTGACGATGTGTTCGC
CGAGGATACACCTTCTCCACCAGCCACACCTCTGGACCTGCAGATCAGCC
CTGATCAGTCTAGCGGCGAGAGCGAGTACGATGAGGACGAAGAGGACGAG
GATGAGGAAGAGAACGACGACGTCCAAGAGGAAGATGAGCCCGAGGGCTA
CCCCGCCGATTTCTTTCAGCCTCTGTCTCACCTGAGGCCTGCCGAGTCCG
AAGCCAGCATGGGATGGGTGTCACAGGACGATGGATTCAGCCCTGCCGGA
CTGAGCCCTTCCGATGATGAAGGCGTGGCCATCCTGGAACCTATGGCCGC
CTATACTGGCACAGGCGCCTATGGACTGTCTCCCGCCAGCAGAAATAGCG
TGCCAGGCACACAGAGCAGCCCCTACTCTGATCCTGATGAGGGCCCATCT
TGGAGGCCCCTTAGAGCTGCTCCTACCGCCATCGTGGATCTGACCAGCGA
CAGCGATAGCGACGACAGCAGCAATAGCCCCGACGTGAACAATGAGGCCG
CCTTCACAGACGCCCGGCACTTTTCTCATCAGCCTCCAAGCAGCGAAGAG
GATGGCGAGGATCAGGGCGAAGTGCTGTCTCAGAGAATCGGCCTGATGGA
CGTGGGCCAGAAGCGGAAGAGACAGAGCACAGCCAGCAGCGGCTCTGAGG
ATGTCGTCAGATGCCAGAGACAGCCCAACCTGAGCAGAAAGGCCGTGGCC
AGCGTGATCATCATCAGCTCTGGCAGCGACACCGATGAGGAACCTAGCTC
TGCCGTGTCCGTGATCGTGTCTCCTAGCAGCACCAAGGGCCATCTGCCTA
CACAGAGCCCTAGCACAAGCGCCCACTCTATCTCTAGCGGCAGCACAACA
ACAGCCGGCAGCAGATGCAGCGACCCCACAAGAATTCTGGCCAGCACACC
TCCTCTGTGCGGCAACGGCGCTTACAATTGGCCTTGGCTGGAT

[0677] Hence, preferably the RNA construct is encoded by a DNA sequence substantially as set out in SEQ ID No: 337, or a fragment or variant thereof.

[0678] In an embodiment, the RNA sequence corresponding to the codon optimised DNA sequence of SEQ ID No: 337 is provided herein as SEQ ID No: 338, as follows:

[SEQ ID No: 338]
AUGGCCAUGUUUGUGCGGACCAGCAGCAGCACCCACGACGAGGAAAGAAU
GCUGCCUAUCGAGGGCGCUCCUCGGAGAAGGCCUCCUGUGAAGUUCAUCU
UCCCACCUCCACCACUGAGCAGCCUGCCUGGAUUUGGCAGACCUAGAGGC
UACGCCGGACCUACCGUGAUCGAUAUGAGCGCCCCUGACGAUGUGUUCGC
CGAGGAUACACCUUCUCCACCAGCCACACCUCUGGACCUGCAGAUCAGCC
CUGAUCAGUCUAGCGGCGAGAGCGAGUACGAUGAGGACGAAGAGGACGAG
GAUGAGGAAGAGAACGACGACGUCCAAGAGGAAGAUGAGCCCGAGGGCUA
CCCCGCCGAUUUCUUUCAGCCUCUGUCUCACCUGAGGCCUCGGCCUCUUG
CUAGAAGGGCCCACACACCUAAACCUGUGGCUGUGGUGGCCGGAAGAGUG
CGGUCUAGCACAGAUACAGCCGAGUCCGAAGCCAGCAUGGGAUGGGUGUC
ACAGGACGAUGGAUUCAGCCCUGCCGGACUGAGCCCUUCCGAUGAUGAAG
GCGUGGCCAUCCUGGAACCUAUGGCCGCCUAUACUGGCACAGGCGCCUAU
GGACUGUCUCCCGCCAGCAGAAAUAGCGUGCCAGGCACACAGAGCAGCCC
CUACUCUGAUCCUGAUGAGGGCCCAUCUUGGAGGCCCCUUAGAGCUGCUC
CUACCGCCAUCGUGGAUCUGACCAGCGACAGCGAUAGCGACGACAGCAGC
AAUAGCCCCGACGUGAACAAUGAGGCCGCCUUCACAGACGCCCGGCACUU
UUCUCAUCAGCCUCCAAGCAGCGAAGAGGAUGGCGAGGAUCAGGGCGAAG
UGCUGUCUCAGAGAAUCGGCCUGAUGGACGUGGGCCAGAAGCGGAAGAGA
CAGAGCACAGCCAGCAGCGGCUCUGAGGAUGUCGUCAGAUGCCAGAGACA
GCCCAACCUGAGCAGAAAGGCCGUGGCCAGCGUGAUCAUCAUCAGCUCUG
GCAGCGACACCGAUGAGGAACCUAGCUCUGCCGUGUCCGUGAUCGUGUCU
CCUAGCAGCACCAAGGGCCAUCUGCCUACACAGAGCCCUAGCACAAGCGC
CCACUCUAUCUCUAGCGGCAGCACAACAACAGCCGGCAGCAGAUGCAGCG
ACCCCACAAGAAUUCUGGCCAGCACACCUCCUCUGUGCGGCAACGGCGCU
UACAAUUGGCCUUGGCUGGAU

[0679] Hence, preferably the RNA construct comprises a sequence substantially as set out in SEQ ID No: 338, or a fragment or variant thereof.

[0680] In one embodiment, the at least one IIP is EBV BZLF-1 (P03206; Trans-activator protein BZLF1 Epstein-Barr virus (strain B95-8)), or an orthologue thereof. Hahn A M, Huye L E, Ning S, Webster-Cyriaque J M Pagano J S (2005) Interferon Regulatory Factor 7 Is Negatively Regulated by the Epstein-Barr Virus Immediate-Early Gene, J Virol, 79, 15, 10040-10052 doi:10.1128/JVI.790.15.10040-10052.2005. One embodiment of the polypeptide sequence of EBV BZLF-1 is represented herein as SEQ ID No: 339, as follows:

[SEQ ID No: 339]
MMDPNSTSEDVKFTPDPYQVPFVQAFDQATRVYQDLGGPSQAPLPCVLWP
VLPEPLPQGQLTAYHVSTAPTGSWFSAPQPAPENAYQAYAAPQLFPVSDI
TQNQQTNQAGGEAPQPGDNSTVQTAAAVVFACPGANQGQQLADIGVPQPA
PVAAPARRTRKPQQPESLEECDSELEIKRYKNRVASRKCRAKFKQLLQHY
REVAAAKSSENDRLRLLLKQMCPSLDVDSIIPRTPDVLHEDLLNF

[0681] Therefore, preferably the RNA construct comprises a nucleotide sequence which encodes an amino acid sequence substantially as set out in SEQ ID No: 339, or a variant or fragment thereof.

[0682] In one embodiment, the EBV BZLF-1 polypeptide is encoded by the DNA nucleotide sequence of SEQ ID No: 340, as follows:

[SEQ ID No: 340]
ATGATGGACCCAAACTCGACTTCTGAAGATGTAAAATTTACACCTGACCC
ATACCAGGTGCCTTTTGTACAAGCTTTTGACCAAGCTACCAGAGTCTATC
AGGACCTGGGAGGGCCATCGCAAGCTCCTTTGCCTTGTGTGCTGTGGCCG
GTGCTGCCAGAGCCTCTGCCACAAGGCCAGCTAACTGCCTATCATGTTTC
AACCGCTCCGACTGGGTCGTGGTTTTCTGCCCCTCAGCCTGCTCCTGAGA
ATGCTTATCAAGCTTATGCAGCACCTCAGCTGTTCCCAGTCTCCGACATA
ACCCAGAATCAACAGACTAACCAAGCCGGGGGAGAAGCACCTCAACCTGG
AGACAATTCTACTGTTCAAACAGCAGCAGCAGTGGTGTTTGCTTGCCCCG
GGGCTAACCAAGGACAACAGCTAGCAGACATTGGTGTTCCACAGCCTGCA
CCAGTGGCTGCCCCGGCACGACGCACACGGAAACCACAACAGCCAGAATC
GCTGGAGGAATGCGATTCTGAACTAGAAATAAAGCGATACAAGAATCGGG
TGGCTTCCAGAAAATGCCGGGCCAAGTTTAAGCAACTGCTGCAGCACTAC
CGTGAGGTCGCTGCTGCCAAATCATCTGAAAATGACAGGCTGCGCCTCCT
GTTGAAGCAGATGTGCCCAAGCCTGGATGTTGACTCCATTATCCCCCGGA
CACCAGATGTTTTACACGAGGATCTCTTAAATTTC

[0683] Accordingly, preferably the EBV BZLF-1 polypeptide is encoded by the DNA nucleotide sequence substantially as set out in SEQ ID NO: 340, or a variant or fragment thereof.

[0684] One embodiment of codon optimised nucleic acid (DNA) encoding the EBV BZLF-1 polypeptide is provided herein as SEQ ID No: 341, as follows:

[SEQ ID No: 341]
ATGATGGACCCCAACAGCACCAGCGAGGACGTGAAGTTCACCCCTGATCC
TTACCAGGTGCCATTCGTGCAGGCCTTCCCTGAACCTCTGCCTCAGGGAC
AGCTGACAGCCTACCATGTGTCTACAGCCCCTACCGGCAGCTGGTTTTCT
GCTCCTCAACCTGCTCCTGAGAACGCCTACCAGGCCTATGCTGCCCCTCA
GCTGTTTCCCGTGTCCGACATCACCCAGAACCAGCAGACAAATCAGGCTG
GCGGAGAAGCTCCTCAGCCTGGCGATAATAGCACCGTGCAGACAGCTGCC
GCCGTGGTGTTTGCTTGTCCTGGCGCTAATCAGGGCCAGCAGCTGGCTGA
TATTGGCGTGCCACAACCAGCTCCAGTGGCCGCTCCTGCCAGAAGAACAA
GAAAGCCTCAGCAGCCCGAGAGCCTGGAAGAGTGCGATAGCGAGCTGGAA
ATCAAGCGGTACAAGAACAGAGTGGCCAGCCGGAAGTGCCGGGCCAAGTT
TAAACAGCTGCTCCAGCACTACAGAGAGGTGGCCGCTGCCAAGAGCAGCG
AGAACGATAGACTGCGGCTGCTGCTGAAGCAGATGTGCCCTAGCCTGGAC
GTGGACAGCATCATCCCCAGAACACCCGATGTGCTGCACGAGGACCTGCT
GAACTTT

[0685] Hence, preferably the RNA construct is encoded by a DNA sequence substantially as set out in SEQ ID No: 341, or a fragment or variant thereof.

[0686] In an embodiment, the RNA sequence corresponding to the codon optimised DNA sequence of SEQ ID No: 341 is provided herein as SEQ ID No: 342, as follows:

[SEQ ID No: 342]
AUGAUGGACCCCAACAGCACCAGCGAGGACGUGAAGUUCACCCCUGAUCC
UUACCAGGUGCCAUUCGUGCAGGCCUUCGAUCAGGCCACCAGAGUGUACC
AGGAUCUCGGCGGACCUUCUCAGGCUCCUCUGCCUUGUGUUCUGUGGCCU
GUGCUGCCUGAACCUCUGCCUCAGGGACAGCUGACAGCCUACCAUGUGUC
UACAGCCCCUACCGGCAGCUGGUUUUCUGCUCCUCAACCUGCUCCUGAGA
ACGCCUACCAGGCCUAUGCUGCCCCUCAGCUGUUUCCCGUGUCCGACAUC
ACCCAGAACCAGCAGACAAAUCAGGCUGGCGGAGAAGCUCCUCAGCCUGG
CGAUAAUAGCACCGUGCAGACAGCUGCCGCCGUGGUGUUUGCUUGUCCUG
GCGCUAAUCAGGGCCAGCAGCUGGCUGAUAUUGGCGUGCCACAACCAGCU
CCAGUGGCCGCUCCUGCCAGAAGAACAAGAAAGCCUCAGCAGCCCGAGAG
CCUGGAAGAGUGCGAUAGCGAGCUGGAAAUCAAGCGGUACAAGAACAGAG
UGGCCAGCCGGAAGUGCCGGGCCAAGUUUAAACAGCUGCUCCAGCACUAC
AGAGAGGUGGCCGCUGCCAAGAGCAGCGAGAACGAUAGACUGCGGCUGCU
GCUGAAGCAGAUGUGCCCUAGCCUGGACGUGGACAGCAUCAUCCCCAGAA
CACCCGAUGUGCUGCACGAGGACCUGCUGAACUUU

[0687] Hence, preferably the RNA construct comprises a sequence substantially as set out in SEQ ID No: 342, or a fragment or variant thereof.

[0688] In one embodiment, the at least one IIP is MuHV Orf73 (041974; MHV68 ORF73 protein Murine herpesvirus 4), or an orthologue thereof. One embodiment of the polypeptide sequence of MuHV Orf73 is represented herein as SEQ ID No: 343, as follows:

[SEQ ID No: 343]
MPTSPPTTRNTTSGKTRSGCKRRCFNKPAAMPPKRRRAPKRPAPPPPPGC
QGDEESSQGTQTPNPPSPPVPPSSPTLPSSPVPPSSPVHEPPSPSPPPAP
PSPDVDVEGLDVGETDDPGPPPPKRYSRYQKPHNPSDPLPKKYQGMRRHL
QVTAPRLFDPEGHPPTHFKSAVMFSSTHPYTLNKLHKCIQSKHVLSTPVS
CLPLVPGTTQQCVTYYLLSFVEDKKQAKKLKRVVLAYCEKYHSSVEGTIV
KAKPYFPLPEPPTEPPTDPEQPSTSTQASGTQHGPTASLDAGAEQGATGS
PGSSPGQQGQGSQT

[0689] Therefore, preferably the RNA construct comprises a nucleotide sequence which encodes an amino acid sequence substantially as set out in SEQ ID No: 343, or a variant or fragment thereof.

[0690] In one embodiment, the MuHV Orf73 polypeptide is encoded by the DNA nucleotide sequence of SEQ ID No: 344, as follows:

[SEQ ID No: 344]
ATGCCCACATCCCCACCGACTACACGCAACACAACCTCAGGCAAAACCAG
ATCAGGGTGCAAACGTAGGTGCTTCAACAAACCAGCAGCCATGCCTCCTA
AAAGACGCCGCGCTCCAAAAAGACCAGCCCCTCCTCCACCACCGGGATGC
CAAGGTGATGAGGAGTCCAGCCAGGGAACTCAAACGCCAAACCCCCCATC
ACCACCAGTGCCCCCTTCATCACCAACACTTCCCTCATCCCCCGTCCCTC
CTTCATCACCAGTACATGAGCCACCATCTCCTTCCCCCCCACCAGCCCCA
CCATCACCAGATGTTGATGTTGAAGGTTTAGATGTAGGAGAGACAGACGA
TCCCGGTCCCCCTCCACCAAAAAGATACTCCAGGTATCAAAAACCGCATA
ATCCATCTGATCCATTGCCTAAAAAATATCAGGGAATGCGAAGACACCTG
CAGGTGACAGCACCCAGGTTATTTGATCCCGAGGGTCACCCCCCAACACA
TTTTAAGTCAGCTGTTATGTTTAGTAGCACACATCCCTACACTTTGAATA
AACTTCACAAGTGTATCCAAAGCAAACATGTACTCTCAACACCAGTTAGC
TGTTTACCCTTGGTACCAGGCACAACACAACAGTGTGTAACATACTATTT
ACTTTCATTTGTTGAAGACAAGAAACAGGCCAAAAAACTAAAAAGGGTTG
TCTTGGCCTACTGTGAAAAATACCACAGCAGCGTAGAAGGTACTATAGTC
AAGGCAAAGCCTTATTTTCCCTTACCAGAGCCCCCTACAGAGCCCCCTAC
AGACCCCGAGCAGCCATCCACAAGTACACAAGCTTCTGGCACACAACATG
GTCCCACAGCATCTCTGGATGCCGGTGCAGAGCAAGGTGCCACAGGATCA
CCTGGATCTAGTCCAGGACAACAGGGACAAGGGTCTCAGACA

[0691] Accordingly, preferably the MuHV Orf73 polypeptide is encoded by the DNA nucleotide sequence substantially as set out in SEQ ID NO: 344, or a variant or fragment thereof.

[0692] One embodiment of codon optimised nucleic acid (DNA) encoding the MuHV Orf73 polypeptide is provided herein as SEQ ID No: 345, as follows:

[SEQ ID No: 345]
ATGCCTACAAGCCCTCCTACCACCAGAAACACCACCAGCGGCAAGACAAGAAGCGGCTGCAAGCGGCGGTGCTTCAAC
AAACCTGCTGCCATGCCTCCTAAGCGGCGGAGAGCACCTAAAAGACCTGCTCCTCCTCCACCTCCTGGTTGCCAAGGC
GACGAGGAATCTTCTCAGGGCACCCAGACACCTAATCCTCCATCTCCACCTGTGCCTCCAAGCAGCCCTACACTGCCA
TCTTCTCCAGTGCCACCTAGCAGCCCAGTGCACGAACCACCTAGTCCAAGTCCTCCACCAGCTCCACCTTCTCCAGAC
GTGGACGTGGAAGGACTGGATGTGGGCGAGACAGACGATCCTGGACCTCCACCACCTAAGCGGTACAGCAGATACCAG
AAGCCTCACAACCCCAGCGATCCTCTGCCTAAGAAATACCAGGGCATGCGCCGGCATCTGCAAGTGACAGCCCCTAGA
CTGTTCGACCCTGAGGGACACCCTCCTACACACTTCAAGAGCGCCGTGATGTTCAGCAGCACACACCCCTACACTCTG
AACAAGCTGCACAAGTGCATCCAGAGCAAACACGTGCTGAGCACCCCTGTGTCCTGTCTGCCTCTGGTGCCTGGAACC
ACACAGCAGTGCGTGACCTACTACCTGCTGAGCTTCGTGGAAGATAAGAAGCAGGCCAAGAAACTGAAGAGAGTGGTG
CTGGCCTACTGCGAGAAGTACCACAGCAGCGTGGAAGGCACCATCGTGAAGGCCAAGCCTTACTTCCCACTGCCTGAG
CCTCCAACCGAGCCACCTACAGATCCTGAGCAGCCTAGCACAAGCACACAGGCCTCTGGAACACAGCACGGACCTACA
GCTAGTCTGGATGCTGGTGCTGAACAGGGCGCCACAGGATCACCTGGAAGTAGCCCTGGACAGCAAGGCCAGGGATCT
CAGACA

[0693] Hence, preferably the RNA construct is encoded by a DNA sequence substantially as set out in SEQ ID No: 345, or a fragment or variant thereof.

[0694] In an embodiment, the RNA sequence corresponding to the codon optimised DNA sequence of SEQ ID No: 345 is provided herein as SEQ ID No: 346, as follows:

[SEQ ID No: 346]
AUGCCUACAAGCCCUCCUACCACCAGAAACACCACCAGCGGCAAGACAAGAAGCGGCUGCAAGCGGCGGUGCUUCAAC
AAACCUGCUGCCAUGCCUCCUAAGCGGCGGAGAGCACCUAAAAGACCUGCUCCUCCUCCACCUCCUGGUUGCCAAGGC
GACGAGGAAUCUUCUCAGGGCACCCAGACACCUAAUCCUCCAUCUCCACCUGUGCCUCCAAGCAGCCCUACACUGCCA
UCUUCUCCAGUGCCACCUAGCAGCCCAGUGCACGAACCACCUAGUCCAAGUCCUCCACCAGCUCCACCUUCUCCAGAC
GUGGACGUGGAAGGACUGGAUGUGGGCGAGACAGACGAUCCUGGACCUCCACCACCUAAGCGGUACAGCAGAUACCAG
AAGCCUCACAACCCCAGCGAUCCUCUGCCUAAGAAAUACCAGGGCAUGCGCCGGCAUCUGCAAGUGACAGCCCCUAGA
CUGUUCGACCCUGAGGGACACCCUCCUACACACUUCAAGAGCGCCGUGAUGUUCAGCAGCACACACCCCUACACUCUG
AACAAGCUGCACAAGUGCAUCCAGAGCAAACACGUGCUGAGCACCCCUGUGUCCUGUCUGCCUCUGGUGCCUGGAACC
ACACAGCAGUGCGUGACCUACUACCUGCUGAGCUUCGUGGAAGAUAAGAAGCAGGCCAAGAAACUGAAGAGAGUGGUG
CUGGCCUACUGCGAGAAGUACCACAGCAGCGUGGAAGGCACCAUCGUGAAGGCCAAGCCUUACUUCCCACUGCCUGAG
CCUCCAACCGAGCCACCUACAGAUCCUGAGCAGCCUAGCACAAGCACACAGGCCUCUGGAACACAGCACGGACCUACA
GCUAGUCUGGAUGCUGGUGCUGAACAGGGCGCCACAGGAUCACCUGGAAGUAGCCCUGGACAGCAAGGCCAGGGAUCU
CAGACA

[0695] Hence, preferably the RNA construct comprises a sequence substantially as set out in SEQ ID No: 346, or a fragment or variant thereof.

[0696] In one embodiment, the at least one IIP is Torque Teno virus Orf2 (A7XCD9; ORF2 protein Torque teno virus (isolate Human/Finland/Hel32/2002)), or an orthologue thereof. Zheng H, Ye L, Fang X, Li B, Wang Y, Xiang X, Kong L, Wang W et al. (2007) Torque teno virus (SANBAN isolate) ORF2 protein suppresses NF-kB pathways via interaction with IkappaB kinases. J Virol, 81, 21, 11917-11924. It is believed that this IIP suppresses canonical and non-canonical Nf-KB pathways. One embodiment of the polypeptide sequence of Torque Teno virus Orf2 is represented herein as SEQ ID No: 347, as follows:

[SEQ ID No: 347]
MWQPPTQNGTQLERHWFESVWRSHAAFCSCGDCIGHLQHLATNLGRPPAPQPPRDQHPPHIRGLPALPAPPSNRNSWP
GTGGDAAGGEAGGSRGAGDGGDGELADEDLLDAIALAAE

[0697] Therefore, preferably the RNA construct comprises a nucleotide sequence which encodes an amino acid sequence substantially as set out in SEQ ID No: 347, or a variant or fragment thereof.

[0698] In one embodiment, the Torque Teno virus Orf2 polypeptide is encoded by the DNA nucleotide sequence of SEQ ID No: 348, as follows:

[SEQ ID No: 348]
ATGTGGCAGCCACCTACCCAGAATGGAACCCAACTCGAACGGCACTGGTTCGAGTCCGTTTGGCGTTCGCATGCTGCC
TTTTGTAGCTGTGGCGACTGTATTGGCCATCTTCAGCATCTGGCTACTAACCTGGGTCGACCACCTGCTCCACAACCG
CCGCGAGACCAACACCCACCGCACATAAGAGGGCTCCCGGCACTCCCGGCACCTCCCAGTAACAGAAACTCATGGCCT
GGTACTGGTGGAGACGCCGCCGGAGGAGAGGCTGGTGGAAGCCGAGGCGCAGGAGATGGAGGAGACGGAGAGCTCGCA
GACGAGGACCTGCTAGACGCCATCGCGCTCGCCGCAGAG

[0699] Accordingly, preferably the Torque Teno virus Orf2 polypeptide is encoded by the DNA nucleotide sequence substantially as set out in SEQ ID NO: 348, or a variant or fragment thereof.

[0700] One embodiment of codon optimised nucleic acid (DNA) encoding the Torque Teno virus Orf2 polypeptide is provided herein as SEQ ID No: 349, as follows:

[SEQ ID No: 349]
ATGTGGCAGCCTCCTACACAGAATGGCACCCAGCTGGAACGGCATTGGTTCGAGAGCGTTTGGAGAAGCCACGCCGCT
TTCTGCAGCTGCGGAGATTGCATCGGACATCTGCAGCACCTGGCCACCAATCTGGGTAGACCTCCAGCTCCTCAGCCT
CCTCGAGATCAGCACCCTCCTCACATCAGAGGACTGCCTGCACTTCCTGCTCCTCCAAGCAACAGAAACAGCTGGCCT
GGCACAGGCGGAGATGCTGCTGGCGGAGAAGCTGGTGGATCTAGAGGTGCCGGCGACGGTGGCGACGGCGAACTTGCT
GATGAAGATCTGCTGGACGCTATCGCCCTGGCCGCTGAA

[0701] Hence, preferably the RNA construct is encoded by a DNA sequence substantially as set out in SEQ ID No: 349, or a fragment or variant thereof.

[0702] In an embodiment, the RNA sequence corresponding to the codon optimised DNA sequence of SEQ ID No: 349 is provided herein as SEQ ID No: 350, as follows:

[SEQ ID No: 350]
AUGUGGCAGCCUCCUACACAGAAUGGCACCCAGCUGGAACGGCAUUGGUUCGAGAGCGUUUGGAGAAGCCACGCCGCU
UUCUGCAGCUGCGGAGAUUGCAUCGGACAUCUGCAGCACCUGGCCACCAAUCUGGGUAGACCUCCAGCUCCUCAGCCU
CCUCGAGAUCAGCACCCUCCUCACAUCAGAGGACUGCCUGCACUUCCUGCUCCUCCAAGCAACAGAAACAGCUGGCCU
GGCACAGGCGGAGAUGCUGCUGGCGGAGAAGCUGGUGGAUCUAGAGGUGCCGGCGACGGUGGCGACGGCGAACUUGCU
GAUGAAGAUCUGCUGGACGCUAUCGCCCUGGCCGCUGAA

[0703] Hence, preferably the RNA construct comprises a sequence substantially as set out in SEQ ID No: 350, or a fragment or variant thereof.

[0704] In one embodiment, the at least one IIP is EBV EBNA1 (P03211; Epstein-Barr nuclear antigen 1 Epstein-Barr virus (strain B95-8)), or an orthologue thereof. One embodiment of the polypeptide sequence of EBV EBNA1 is represented herein as SEQ ID No: 351, as follows:

[SEQ ID No: 351]
MSDEGPGTGPGNGLGEKGDTSGPEGSGGSGPQRRGGDNHGRGRGRGRGRGGGRPGAPGGSGSGPRHRDGVRRPQKRPS
CIGCKGTHGGTGAGAGAGGAGAGGAGAGGGAGAGGGAGGAGGAGGAGAGGGAGAGGGAGGAGGAGAGGGAGAGGGAGG
AGAGGGAGGAGGAGAGGGAGAGGGAGGAGAGGGAGGAGGAGAGGGAGAGGAGGAGGAGAGGAGAGGGAGGAGGAGAGG
AGAGGAGAGGAGAGGAGGAGAGGAGGAGAGGAGGAGAGGGAGGAGAGGGAGGAGAGGAGGAGAGGAGGAGAGGAGGAG
AGGGAGAGGAGAGGGGRGRGGSGGRGRGGSGGRGRGGSGGRRGRGRERARGGSRERARGRGRGRGEKRPRSPSSQSSS
SGSPPRRPPPGRRPFFHPVGEADYFEYHQEGGPDGEPDVPPGAIEQGPADDPGEGPSTGPRGQGDGGRRKKGGWFGKH
RGQGGSNPKFENIAEGLRALLARSHVERTTDEGTWVAGVFVYGGSKTSLYNLRRGTALAIPQCRLTPLSRLPFGMAPG
PGPQPGPLRESIVCYFMVFLQTHIFAEVLKDAIKDLVMTKPAPTCNIRVTVCSFDDGVDLPPWFPPMVEGAAAEGDDG
DDGDEGGDGDEGEEGQE

[0705] Therefore, preferably the RNA construct comprises a nucleotide sequence which encodes an amino acid sequence substantially as set out in SEQ ID No: 351, or a variant or fragment thereof.

[0706] In one embodiment, the EBV EBNA1 polypeptide is encoded by the DNA nucleotide sequence of SEQ ID No: 352, as follows:

[SEQ ID No: 352]
ATGTCTGACGAGGGGCCAGGTACAGGACCTGGAAATGGCCTAGGAGAGAAGGGAGACACATCTGGACCAGAAGGCTCC
GGCGGCAGTGGACCTCAAAGAAGAGGGGGTGATAACCATGGACGAGGACGGGGAAGAGGACGAGGACGAGGAGGCGGA
AGACCAGGAGCCCCGGGCGGCTCAGGATCAGGGCCAAGACATAGAGATGGTGTCCGGAGACCCCAAAAACGTCCAAGT
TGCATTGGCTGCAAAGGGACCCACGGTGGAACAGGAGCAGGAGCAGGAGCGGGAGGGGCAGGAGCAGGAGGGGCAGGA
GCAGGAGGAGGGGCAGGAGCAGGAGGAGGGGCAGGAGGGGCAGGAGGGGCAGGAGGGGCAGGAGCAGGAGGAGGGGCA
GGAGCAGGAGGAGGGGCAGGAGGGGCAGGAGGGGCAGGAGCAGGAGGAGGGGCAGGAGCAGGAGGAGGGGCAGGAGGG
GCAGGAGCAGGAGGAGGGGCAGGAGGGGCAGGAGGGGCAGGAGCAGGAGGAGGGGCAGGAGCAGGAGGAGGGGCAGGA
GGGGCAGGAGCAGGAGGAGGGGCAGGAGGGGCAGGAGGGGCAGGAGCAGGAGGAGGGGCAGGAGCAGGAGGGGCAGGA
GGGGCAGGAGGGGCAGGAGCAGGAGGGGCAGGAGCAGGAGGAGGGGCAGGAGGGGCAGGAGGGGCAGGAGCAGGAGGG
GCAGGAGCAGGAGGGGCAGGAGCAGGAGGGGCAGGAGCAGGAGGGGCAGGAGGGGCAGGAGCAGGAGGGGCAGGAGGG
GCAGGAGCAGGAGGGGCAGGAGGGGCAGGAGCAGGAGGAGGGGCAGGAGGGGCAGGAGCAGGAGGAGGGGCAGGAGGG
GCAGGAGCAGGAGGGGCAGGAGGGGCAGGAGCAGGAGGGGCAGGAGGGGCAGGAGCAGGAGGGGCAGGAGGGGCAGGA
GCAGGAGGAGGGGCAGGAGCAGGAGGGGCAGGAGCAGGAGGTGGAGGCCGGGGTCGAGGAGGCAGTGGAGGCCGGGGT
CGAGGAGGTAGTGGAGGCCGGGGTCGAGGAGGTAGTGGAGGCCGCCGGGGTAGAGGACGTGAAAGAGCCAGGGGGGGA
AGTCGTGAAAGAGCCAGGGGGAGAGGTCGTGGACGTGGAGAAAAGAGGCCCAGGAGTCCCAGTAGTCAGTCATCATCA
TCCGGGTCTCCACCGCGCAGGCCCCCTCCAGGTAGAAGGCCATTTTTCCACCCTGTAGGGGAAGCCGATTATTTTGAA
TACCACCAAGAAGGTGGCCCAGATGGTGAGCCTGACGTGCCCCCGGGAGCGATAGAGCAGGGCCCCGCAGATGACCCA
GGAGAAGGCCCAAGCACTGGACCCCGGGGTCAGGGTGATGGAGGCAGGCGCAAAAAAGGAGGGTGGTTTGGAAAGCAT
CGTGGTCAAGGAGGTTCCAACCCGAAATTTGAGAACATTGCAGAAGGTTTAAGAGCTCTCCTGGCTAGGAGTCACGTA
GAAAGGACTACCGACGAAGGAACTTGGGTCGCCGGTGTGTTCGTATATGGAGGTAGTAAGACCTCCCTTTACAACCTA
AGGCGAGGAACTGCCCTTGCTATTCCACAATGTCGTCTTACACCATTGAGTCGTCTCCCCTTTGGAATGGCCCCTGGA
CCCGGCCCACAACCTGGCCCGCTAAGGGAGTCCATTGTCTGTTATTTCATGGTCTTTTTACAAACTCATATATTTGCT
GAGGTTTTGAAGGATGCGATTAAGGACCTTGTTATGACAAAGCCCGCTCCTACCTGCAATATCAGGGTGACTGTGTGC
AGCTTTGACGATGGAGTAGATTTGCCTCCCTGGTTTCCACCTATGGTGGAAGGGGCTGCCGCGGAGGGTGATGACGGA
GATGACGGAGATGAAGGAGGTGATGGAGATGAGGGTGAGGAAGGGCAGGAGTGA

[0707] Accordingly, preferably the EBV EBNA1 polypeptide is encoded by the DNA nucleotide sequence substantially as set out in SEQ ID NO: 352, or a variant or fragment thereof.

[0708] One embodiment of codon optimised nucleic acid (DNA) encoding the EBV EBNA1 polypeptide is provided herein as SEQ ID No: 353, as follows:

[SEQ ID No: 353]
ATGTCCGATGAAGGCCCTGGAACAGGCCCTGGCAATGGACTGGGAGAGAAGGGCGATACAAGCGGCCCTGAAGGTTCT
GGCGGATCTGGCCCTCAAAGAAGAGGCGGCGATAATCACGGCAGAGGACGCGGAAGAGGTAGAGGCAGAGGCGGAGGT
AGACCTGGTGCTCCTGGTGGTTCTGGCTCTGGCCCTAGACATAGAGATGGCGTCAGACGGCCTCAGAAGAGGCCTTCT
TGTATCGGCTGCAAGGGCACACATGGCGGAACAGGTGCTGGTGCTGGCGCAGGCGGAGCAGGCGCTGGTGGTGCAGGC
GCTGGCGGCGGTGCCGGTGCAGGCGGCGGAGCTGGTGGCGCTGGCGGTGCTGGCGGAGCTGGTGCAGGCGGAGGTGCC
GGCGCTGGTGGCGGAGCAGGCGGAGCTGGCGGAGCCGGCGCTGGCGGTGGCGCTGGTGCCGGCGGAGGCGCAGGCGGC
GCTGGTGCTGGTGGTGGTGCTGGCGGCGCAGGCGGTGCAGGCGCAGGCGGAGGCGCTGGCGCTGGCGGTGGTGCAGGC
GGTGCTGGCGCTGGCGGCGGTGCTGGCGGAGCCGGTGGTGCTGGTGCTGGTGGCGGAGCTGGCGCTGGCGGAGCTGGC
GGTGCAGGCGGCGCAGGCGCTGGTGGCGCTGGCGCAGGCGGTGGCGCTGGCGGAGCAGGCGGAGCTGGCGCTGGCGGC
GCAGGCGCAGGCGGAGCCGGTGCTGGCGGAGCTGGTGCTGGTGGTGCAGGCGGAGCTGGTGCCGGTGGCGCTGGTGGT
GCCGGTGCCGGTGGTGCCGGCGGAGCCGGCGCAGGCGGCGGTGCAGGCGGAGCAGGCGCAGGCGGCGGAGCTGGTGGT
GCCGGCGCAGGCGGCGCTGGTGGTGCTGGTGCCGGCGGAGCTGGTGGCGCAGGCGCTGGCGGTGCAGGCGGTGCCGGT
GCCGGTGGTGGTGCAGGCGCAGGCGGTGCTGGTGCCGGCGGTGGCGGAAGAGGAAGAGGTGGTAGCGGAGGCCGAGGA
CGAGGCGGAAGTGGTGGTCGTGGTAGAGGCGGCAGCGGAGGAAGAAGAGGACGGGGTAGAGAACGAGCTAGAGGCGGA
TCTAGAGAGAGAGCCCGAGGCAGAGGAAGAGGCCGCGGAGAGAAAAGACCTAGAAGCCCTAGCAGCCAGAGCAGCTCT
AGCGGATCTCCACCTAGAAGGCCACCTCCAGGCAGACGGCCATTCTTTCACCCTGTGGGCGAAGCCGACTACTTCGAG
TACCACCAAGAAGGCGGACCTGACGGCGAACCTGATGTTCCTCCTGGCGCCATTGAACAGGGCCCAGCTGATGATCCT
GGCGAGGGACCTTCTACAGGCCCTAGAGGACAAGGCGACGGCGGCAGACGAAAGAAAGGCGGATGGTTCGGCAAGCAC
AGAGGCCAAGGTGGCAGCAACCCCAAGTTCGAGAATATCGCCGAGGGCCTGAGAGCCCTGCTGGCCAGATCTCACGTG
GAAAGAACCACCGACGAAGGCACATGGGTGGCAGGCGTGTTCGTTTACGGCGGCTCTAAGACCAGCCTGTACAACCTG
AGAAGAGGCACAGCCCTGGCCATTCCTCAGTGCAGACTGACCCCTCTGAGCAGACTGCCTTTTGGCATGGCTCCTGGA
CCTGGACCTCAACCTGGACCACTGAGAGAATCCATCGTGTGCTACTTCATGGTGTTTCTGCAGACCCACATCTTCGCC
GAGGTGCTGAAGGACGCCATCAAGGACCTGGTCATGACAAAGCCCGCTCCTACCTGCAACATCAGAGTGACCGTGTGC
AGCTTCGACGACGGCGTTGACCTGCCTCCTTGGTTTCCTCCAATGGTGGAAGGCGCTGCTGCCGAAGGCGACGATGGC
GACGACGGCGACGAAGGTGGCGACGGCGACGAGGGCGAAGAAGGACAAGAGTAA

[0709] Hence, preferably the RNA construct is encoded by a DNA sequence substantially as set out in SEQ ID No: 353, or a fragment or variant thereof.

[0710] In an embodiment, the RNA sequence corresponding to the codon optimised DNA sequence of SEQ ID No: 353 is provided herein as SEQ ID No: 354, as follows:

[SEQ ID No: 354]
AUGUCCGAUGAAGGCCCUGGAACAGGCCCUGGCAAUGGACUGGGAGAGAAGGGCGAUACAAGCGGCCCUGAAGGUUCU
GGCGGAUCUGGCCCUCAAAGAAGAGGCGGCGAUAAUCACGGCAGAGGACGCGGAAGAGGUAGAGGCAGAGGCGGAGGU
AGACCUGGUGCUCCUGGUGGUUCUGGCUCUGGCCCUAGACAUAGAGAUGGCGUCAGACGGCCUCAGAAGAGGCCUUCU
UGUAUCGGCUGCAAGGGCACACAUGGCGGAACAGGUGCUGGUGCUGGCGCAGGCGGAGCAGGCGCUGGUGGUGCAGGC
GCUGGCGGCGGUGCCGGUGCAGGCGGCGGAGCUGGUGGCGCUGGCGGUGCUGGCGGAGCUGGUGCAGGCGGAGGUGCC
GGCGCUGGUGGCGGAGCAGGCGGAGCUGGCGGAGCCGGCGCUGGCGGUGGCGCUGGUGCCGGCGGAGGCGCAGGCGGC
GCUGGUGCUGGUGGUGGUGCUGGCGGCGCAGGCGGUGCAGGCGCAGGCGGAGGCGCUGGCGCUGGCGGUGGUGCAGGC
GGUGCUGGCGCUGGCGGCGGUGCUGGCGGAGCCGGUGGUGCUGGUGCUGGUGGCGGAGCUGGCGCUGGCGGAGCUGGC
GGUGCAGGCGGCGCAGGCGCUGGUGGCGCUGGCGCAGGCGGUGGCGCUGGCGGAGCAGGCGGAGCUGGCGCUGGCGGC
GCAGGCGCAGGCGGAGCCGGUGCUGGCGGAGCUGGUGCUGGUGGUGCAGGCGGAGCUGGUGCCGGUGGCGCUGGUGGU
GCCGGUGCCGGUGGUGCCGGCGGAGCCGGCGCAGGCGGCGGUGCAGGCGGAGCAGGCGCAGGCGGCGGAGCUGGUGGU
GCCGGCGCAGGCGGCGCUGGUGGUGCUGGUGCCGGCGGAGCUGGUGGCGCAGGCGCUGGCGGUGCAGGCGGUGCCGGU
GCCGGUGGUGGUGCAGGCGCAGGCGGUGCUGGUGCCGGCGGUGGCGGAAGAGGAAGAGGUGGUAGCGGAGGCCGAGGA
CGAGGCGGAAGUGGUGGUCGUGGUAGAGGCGGCAGCGGAGGAAGAAGAGGACGGGGUAGAGAACGAGCUAGAGGCGGA
UCUAGAGAGAGAGCCCGAGGCAGAGGAAGAGGCCGCGGAGAGAAAAGACCUAGAAGCCCUAGCAGCCAGAGCAGCUCU
AGCGGAUCUCCACCUAGAAGGCCACCUCCAGGCAGACGGCCAUUCUUUCACCCUGUGGGCGAAGCCGACUACUUCGAG
UACCACCAAGAAGGCGGACCUGACGGCGAACCUGAUGUUCCUCCUGGCGCCAUUGAACAGGGCCCAGCUGAUGAUCCU
GGCGAGGGACCUUCUACAGGCCCUAGAGGACAAGGCGACGGCGGCAGACGAAAGAAAGGCGGAUGGUUCGGCAAGCAC
AGAGGCCAAGGUGGCAGCAACCCCAAGUUCGAGAAUAUCGCCGAGGGCCUGAGAGCCCUGCUGGCCAGAUCUCACGUG
GAAAGAACCACCGACGAAGGCACAUGGGUGGCAGGCGUGUUCGUUUACGGCGGCUCUAAGACCAGCCUGUACAACCUG
AGAAGAGGCACAGCCCUGGCCAUUCCUCAGUGCAGACUGACCCCUCUGAGCAGACUGCCUUUUGGCAUGGCUCCUGGA
CCUGGACCUCAACCUGGACCACUGAGAGAAUCCAUCGUGUGCUACUUCAUGGUGUUUCUGCAGACCCACAUCUUCGCC
GAGGUGCUGAAGGACGCCAUCAAGGACCUGGUCAUGACAAAGCCCGCUCCUACCUGCAACAUCAGAGUGACCGUGUGC
AGCUUCGACGACGGCGUUGACCUGCCUCCUUGGUUUCCUCCAAUGGUGGAAGGCGCUGCUGCCGAAGGCGACGAUGGC
GACGACGGCGACGAAGGUGGCGACGGCGACGAGGGCGAAGAAGGACAAGAGUAA

[0711] Hence, preferably the RNA construct comprises a sequence substantially as set out in SEQ 50 ID No: 354, or a fragment or variant thereof.

[0712] In one embodiment, the at least one IIP is BDV P protein (POC799; Phosphoprotein Borna disease virus (strain V)), or an orthologue thereof. It is believed that this IIP acts as a decoy protein for phosphorylation by TBK, thus effecting reduction in TBK activity and activation of IRF3 and 7. One embodiment of the polypeptide sequence of BDV P protein is represented herein as SEQ ID No: 355, as follows:

[SEQ ID No: 355]
MATRPSSLVDSLEDEEDPQTLRRERPGSPRPRKVPRNALTQPVDQLLKDLRKNPSMISDPDQRTGREQLSNDELIKKL
VTELAENSMIEAEEVRGTLGDISARIEAGFESLSALQVETIQTAQRCDHSDSIRILGENIKILDRSMKTMMETMKLMM
EKVDLLYASTAVGTSAPMLPSHPAPPRIYPQLPSAPTTDEWDIIP

[0713] Therefore, preferably the RNA construct comprises a nucleotide sequence which encodes an amino acid sequence substantially as set out in SEQ ID No: 355, or a variant or fragment thereof.

[0714] In one embodiment, the BDV P polypeptide is encoded by the DNA nucleotide sequence of SEQ ID No: 356, as follows:

[SEQ ID No: 356]
ATGGCAACGCGACCATCGAGTCTGGTCGACTCCCTGGAGGACGAAGAAGATCCCCAGACACTACGACGGGAACGACCG
GGGTCACCAAGACCACGGAAGGTCCCAAGGAATGCATTGACCCAACCAGTAGACCAGCTCCTGAAGGACCTCAGGAAG
AACCCCTCCATGATCTCAGACCCAGACCAGCGAACCGGAAGGGAGCAGCTGTCGAATGATGAGCTAATCAAGAAGTTA
GTGACGGAGCTGGCCGAGAATAGCATGATCGAGGCTGAGGAGGTGCGGGGCACTCTTGGAGACATCTCGGCTCGTATC
GAGGCAGGGTTTGAGTCCCTGTCCGCCCTCCAAGTGGAAACCATCCAGACAGCTCAGCGGTGCGATCACTCCGACAGC
ATCAGGATCCTCGGCGAGAACATCAAGATACTAGATCGCTCCATGAAGACAATGATGGAGACAATGAAGCTCATGATG
GAGAAGGTGGATCTCCTCTACGCATCAACCGCCGTTGGGACCTCTGCACCCATGTTGCCCTCCCATCCTGCACCTCCG
CGCATTTATCCCCAGCTCCCAAGTGCCCCGACAACGGATGAATGGGACATCATACCA

[0715] Accordingly, preferably the BDV P polypeptide is encoded by the DNA nucleotide sequence substantially as set out in SEQ ID NO: 356, or a variant or fragment thereof.

[0716] One embodiment of codon optimised nucleic acid (DNA) encoding the BDV P polypeptide is provided herein as SEQ ID No: 357, as follows:

[SEQ ID No: 357]
ATGGCCACAAGACCTAGCAGCCTGGTGGACAGCCTGGAAGATGAGGAAGATCCCCAGACACTGCGGAGAGAGAGGCCT
GGATCTCCCAGACCTAGAAAGGTGCCCAGAAACGCCCTGACACAGCCCGTTGATCAGCTGCTGAAGGACCTGAGAAAG
AACCCCAGCATGATCAGCGACCCCGACCAGAGAACCGGAAGAGAGCAGCTGTCTAACGACGAGCTGATTAAGAAGCTG
GTCACCGAGCTGGCCGAGAACTCCATGATTGAGGCCGAAGAAGTGCGGGGCACCCTGGGCGATATCTCTGCCAGAATC
GAGGCCGGCTTTGAGTCTCTGAGCGCCCTGCAGGTTGAGACAATCCAGACAGCCCAGAGATGCGACCACAGCGACAGC
ATCAGAATCCTGGGCGAGAACATCAAGATCCTGGATCGGAGCATGAAGACCATGATGGAAACCATGAAGCTGATGATG
GAAAAGGTGGACCTGCTGTACGCCAGCACAGCCGTGGGAACATCTGCTCCCATGCTGCCTTCTCACCCCGCTCCTCCA
AGAATCTACCCTCAGCTGCCTAGCGCTCCCACCACCGATGAGTGGGATATCATCCCT

[0717] Hence, preferably the RNA construct is encoded by a DNA sequence substantially as set out in SEQ ID No: 357, or a fragment or variant thereof.

[0718] In an embodiment, the RNA sequence corresponding to the codon optimised DNA sequence of SEQ ID No: 357 is provided herein as SEQ ID No: 358, as follows:

[SEQ ID No: 358]
AUGGCCACAAGACCUAGCAGCCUGGUGGACAGCCUGGAAGAUGAGGAAGAUCCCCAGACACUGCGGAGAGAGAGGCCU
GGAUCUCCCAGACCUAGAAAGGUGCCCAGAAACGCCCUGACACAGCCCGUUGAUCAGCUGCUGAAGGACCUGAGAAAG
AACCCCAGCAUGAUCAGCGACCCCGACCAGAGAACCGGAAGAGAGCAGCUGUCUAACGACGAGCUGAUUAAGAAGCUG
GUCACCGAGCUGGCCGAGAACUCCAUGAUUGAGGCCGAAGAAGUGCGGGGCACCCUGGGCGAUAUCUCUGCCAGAAUC
GAGGCCGGCUUUGAGUCUCUGAGCGCCCUGCAGGUUGAGACAAUCCAGACAGCCCAGAGAUGCGACCACAGCGACAGC
AUCAGAAUCCUGGGCGAGAACAUCAAGAUCCUGGAUCGGAGCAUGAAGACCAUGAUGGAAACCAUGAAGCUGAUGAUG
GAAAAGGUGGACCUGCUGUACGCCAGCACAGCCGUGGGAACAUCUGCUCCCAUGCUGCCUUCUCACCCCGCUCCUCCA
AGAAUCUACCCUCAGCUGCCUAGCGCUCCCACCACCGAUGAGUGGGAUAUCAUCCCU

[0719] Hence, preferably the RNA construct comprises a sequence substantially as set out in SEQ ID No: 358, or a fragment or variant thereof.

[0720] In one embodiment, the at least one IIP is HPV E7 (P03129; Protein E7 Human papillomavirus type 16), or an orthologue thereof. One embodiment of the polypeptide sequence of HPV E7 is represented herein as SEQ ID No: 359, as follows:

[SEQ ID No: 359]
MHGDTPTLHEYMLDLQPETTDLYCYEQLNDSSEEEDEIDGPAGQAEPDRAHYNIVTFCCKCDSTLRLCVQSTHVDIRT
LEDLLMGTLGIVCPICSQKP

[0721] Therefore, preferably the RNA construct comprises a nucleotide sequence which encodes an amino acid sequence substantially as set out in SEQ ID No: 359, or a variant or fragment thereof.

[0722] In one embodiment, the HPV E7 polypeptide is encoded by the DNA nucleotide sequence of SEQ ID No: 360, as follows:

[SEQ ID No: 360]
ATGCATGGAGATACACCTACATTGCATGAATATATGTTAGATTTGCAACCAGAGACAACTGATCTCTACTGTTATGAG
CAATTAAATGACAGCTCAGAGGAGGAGGATGAAATAGATGGTCCAGCTGGACAAGCAGAACCGGACAGAGCCCATTAC
AATATTGTAACCTTTTGTTGCAAGTGTGACTCTACGCTTCGGTTGTGCGTACAAAGCACACACGTAGACATTCGTACT
TTGGAAGACCTGTTAATGGGCACACTAGGAATTGTGTGCCCCATCTGTTCTCAGAAACCA

[0723] Accordingly, preferably the HPV E7 polypeptide is encoded by the DNA nucleotide sequence substantially as set out in SEQ ID NO: 360, or a variant or fragment thereof.

[0724] One embodiment of codon optimised nucleic acid (DNA) encoding the HPV E7 polypeptide is provided herein as SEQ ID No: 361, as follows:

[SEQ ID No: 361]
ATGCACGGCGATACCCCTACACTGCACGAGTACATGCTGGACCTGCAGCCTGAGACAACCGACCTGTACTGCTACGAG
CAGCTGAACGACAGCAGCGAGGAAGAGGACGAGATTGACGGACCTGCCGGACAGGCCGAACCTGATAGAGCCCACTAC
AATATCGTGACCTTCTGCTGCAAGTGCGACAGCACCCTGAGACTGTGTGTGCAGAGCACCCACGTGGACATCAGAACC
CTGGAAGATCTGCTGATGGGCACCCTGGGCATCGTGTGCCCTATCTGTTCTCAGAAGCCC

[0725] Hence, preferably the RNA construct is encoded by a DNA sequence substantially as set out in SEQ ID No: 361, or a fragment or variant thereof.

[0726] In an embodiment, the RNA sequence corresponding to the codon optimised DNA sequence of SEQ ID No: 361 is provided herein as SEQ ID No: 362, as follows:

[SEQ ID No: 362]
AUGCACGGCGAUACCCCUACACUGCACGAGUACAUGCUGGACCUGCAGCCUGAGACAACCGACCUGUACUGCUACGAG
CAGCUGAACGACAGCAGCGAGGAAGAGGACGAGAUUGACGGACCUGCCGGACAGGCCGAACCUGAUAGAGCCCACUAC
AAUAUCGUGACCUUCUGCUGCAAGUGCGACAGCACCCUGAGACUGUGUGUGCAGAGCACCCACGUGGACAUCAGAACC
CUGGAAGAUCUGCUGAUGGGCACCCUGGGCAUCGUGUGCCCUAUCUGUUCUCAGAAGCCC

[0727] Hence, preferably the RNA construct comprises a sequence substantially as set out in SEQ ID No: 362, or a fragment or variant thereof.

[0728] In one embodiment, the at least one IIP is Arenavirus NP1 protein (A0A2H4RDN2; Nucleoprotein Arenavirus sp.), or an orthologue thereof. One embodiment of the polypeptide sequence of Arenavirus NP1 protein is represented herein as SEQ ID No: 363, as follows:

[SEQ ID No: 363]
MSNSKEVKSFLWTQALRRELSPYCTSVKLQVIKDAQSLLHSLDFSEVSNVQRLMRKDKRDDGDLKRLRDLNQAVNNLV
ELKSQQQKNVLSVGQLSSDDLLVLAADIDRLKAKITRTERPQSNGVYMGNLTAQQLEQRKKLLELVGMTRPNLRAGSD
GVVRVWDVKNPDLLNNQFGTMPSLTIACMTKQGQSDINDVVQALTDLGLIYTAKYPNSSDLDQLVKTHPVLGIIDTEK
SAINVSGYNFSLSAAVKAGACMLDGGNMLETIKVTPQNIDPILKKTLAVKKSVGMFVSDTPGDRNPYENLLYKICLSG
NGWPYIASRTSILGRAWDNTVVDLGSSNPITKPLNQQARDKVPGLQQTVGLTYSQIMCLKDIMTGMDPTSKTWIDIEG
RAEDPVEIAIYQPAGGQYIHFYREPTDAKQFKQDSKYSHGIDIVDLFRVQPGLTSAVIESLPKGMVLICQGSEDIRKL
LDSQGRRDIKLIDVMMSKIDARKFENEVWDDLKTLCNMHTGVVHEKKKRGGKQEITPHCALLDCIMYEAATQGSYKTP
KLTPLLPTDLVFRAGAPKVTL

[0729] Therefore, preferably the RNA construct comprises a nucleotide sequence which encodes an amino acid sequence substantially as set out in SEQ ID No: 363, or a variant or fragment thereof.

[0730] In one embodiment, the Arenavirus NP1 polypeptide is encoded by the DNA nucleotide sequence of SEQ ID No: 364, as follows:

[SEQ ID No: 364]
ATGAGCAACTCCAAGGAGGTGAAGTCCTTTCTTTGGACTCAAGCCCTTAGGAGGGAATTATCACCATACTGCACAAGT
GTCAAACTTCAAGTTATCAAGGATGCTCAGAGTCTCCTTCACAGCTTGGATTTCTCAGAAGTGAGTAATGTACAACGC
TTGATGAGGAAGGACAAAAGGGATGACGGTGACTTGAAGAGGCTGAGAGATTTAAATCAGGCAGTCAACAATCTTGTT
GAACTAAAATCTCAACAGCAGAAAAATGTCTTAAGTGTGGGGCAGCTGTCATCTGATGACCTTTTAGTCCTCGCTGCT
GACATTGACAGGCTGAAAGCAAAGATAACCAGGACAGAGAGGCCCCAATCTAATGGGGTCTACATGGGGAACCTCACA
GCTCAGCAACTTGAACAACGAAAGAAGCTCCTAGAGTTGGTGGGGATGACCAGACCAAACTTAAGAGCTGGTTCTGAT
GGTGTTGTCAGGGTGTGGGACGTGAAGAATCCTGATCTCTTGAATAACCAATTTGGCACAATGCCCAGTCTAACGATT
GCCTGCATGACAAAACAAGGACAATCAGACATAAATGATGTTGTTCAGGCATTAACTGACTTGGGGCTAATTTATACA
GCTAAGTACCCAAATTCATCAGATCTTGATCAACTTGTCAAAACCCATCCAGTTTTGGGCATCATAGACACAGAAAAA
TCTGCCATCAATGTTTCAGGTTACAACTTCAGCCTGTCAGCTGCAGTTAAGGCAGGTGCATGTATGCTAGATGGGGGT
AACATGCTCGAGACCATAAAGGTAACACCTCAGAATATTGATCCAATTCTGAAGAAGACTCTGGCAGTTAAAAAGTCT
GTTGGCATGTTTGTCTCAGACACACCAGGTGACAGAAACCCATATGAAAACTTACTATACAAGATCTGCCTCTCAGGC
AGTAACCCAATCACAAAGCCCCTCAATCAGCAAGCTAGAGACAAAGTTCCTGGTTTGCAGCAAACAGTTGGACTCACA
TACTCACAAATCATGTGTCTCAAAGACATAATGACCGGTATGGACCCGACAAGTAAGACTTGGATTGACATTGAGGGC
AGGGCTGAGGACCCAGTGGAGATTGCCATCTACCAGCCAGCTGGTGGGCAATATATTCATTTCTACAGAGAACCAACA
GATGCCAAGCAATTTAAGCAGGATTCTAAGTACTCACATGGCATTGACATTGTTGACCTGTTTAGGGTGCAACCAGGC
CTTACAAGTGCTGTGATAGAGAGTCTACCGAAAGGGATGGTCTTAACTTGTCAGGGATCTGAGGACATAAGAAAGCTG
TTAGATAGTCAGGGGCGCCGAGACATCAAGTTAATTGATGTGATGATGAGCAAGATTGATGCACGGAAGTTTGAAAAT
GAGGTCTGGGATGATCTTAAAACACTGTGCAACATGCACACTGGGGTGGTCCATGAGAAGAAGAAGAGAGGTGGTAAA
CAAGAAATAACACCTCACTGTGCACTTCTAGACTGCATTATGTATGAGGCAGCCACCCAGGGGTCATACAAGACCCCC
AAATTAACACCTCTGCTACCAACTGACTTGGTGTTTAGAGCAGGAGCACCCAAAGTCACTCTG

[0731] Accordingly, preferably the Arenavirus NP1 polypeptide is encoded by the DNA nucleotide sequence substantially as set out in SEQ ID NO: 364, or a variant or fragment thereof.

[0732] One embodiment of codon optimised nucleic acid (DNA) encoding the Arenavirus NP1 polypeptide is provided herein as SEQ ID No: 365, as follows:

[SEQ ID No: 365]
ATGAGCAACAGCAAAGAAGTCAAGAGCTTCCTCTGGACACAGGCCCTGAGAAGAGAGCTGAGCCCTTACTGCACCAGC
GTGAAGCTGCAAGTGATCAAGGACGCCCAGAGCCTGCTGCACAGCCTGGATTTTTCCGAGGTGTCCAACGTGCAGCGG
CTGATGCGGAAGGACAAGAGAGATGACGGCGACCTGAAGCGGCTGAGGGATCTGAATCAGGCCGTGAACAACCTGGTG
GAACTGAAGTCCCAGCAGCAGAAAAACGTGCTGAGCGTGGGCCAGCTGAGCAGCGACGATCTGCTTGTTCTGGCCGCC
GACATCGACAGACTGAAGGCCAAGATCACCAGAACCGAGCGGCCTCAGAGCAACGGCGTGTACATGGGAAATCTGACA
GCCCAGCAGCTGGAACAGCGGAAGAAACTGCTGGAACTCGTGGGCATGACCCGGCCTAATCTGAGAGCTGGCTCTGAT
GGCGTCGTCAGAGTGTGGGACGTGAAGAACCCCGACCTGCTGAACAACCAGTTCGGCACCATGCCTAGCCTGACAATC
GCCTGCATGACCAAGCAGGGCCAGAGCGACATCAACGATGTGGTGCAGGCACTGACCGACCTGGGCCTGATCTACACC
GCCAAGTATCCCAACAGCAGCGACCTGGATCAGCTGGTCAAGACACACCCTGTGCTGGGCATCATCGACACCGAGAAG
TCCGCCATCAACGTGTCCGGCTACAACTTCTCTCTGTCTGCCGCCGTGAAAGCCGGCGCTTGTATGCTGGATGGCGGC
AACATGCTGGAAACCATCAAAGTGACCCCTCAGAACATCGACCCCATCCTGAAGAAAACCCTGGCCGTGAAGAAAAGC
GTGGGGATGTTCGTGTCTGACACCCCTGGCGACAGAAACCCCTACGAGAACCTGCTGTACAAGATCTGCCTGAGCGGC
AACGGCTGGCCCTATATCGCCAGCAGAACCAGCATTCTGGGCAGAGCCTGGGACAACACCGTGGTGGATCTGGGCAGC
AGCAACCCCATCACCAAGCCTCTGAACCAGCAGGCCAGAGATAAGGTGCCAGGCCTGCAGCAGACAGTGGGCCTGACA
TACAGCCAGATCATGTGCCTGAAGGACATCATGACCGGCATGGACCCCACCAGCAAGACATGGATCGACATCGAGGGC
AGAGCTGAGGACCCTGTGGAAATCGCCATCTACCAACCTGCCGGCGGACAGTACATCCACTTCTACAGAGAGCCCACC
GACGCCAAGCAGTTCAAGCAGGACAGCAAGTACAGCCACGGCATCGATATCGTGGACCTGTTCAGAGTGCAGCCCGGA
CTGACATCTGCCGTGATCGAGTCTCTGCCCAAAGGCATGGTCCTGACCTGTCAGGGCAGCGAGGACATCAGAAAGCTG
CTCGACAGCCAGGGCAGAAGAGACATCAAGCTGATCGACGTGATGATGAGCAAGATCGACGCCCGGAAGTTCGAGAAC
GAAGTGTGGGATGACCTGAAAACCCTCTGCAACATGCACACCGGCGTGGTGCACGAGAAGAAGAAGAGAGGCGGCAAG
CAAGAGATCACCCCTCACTGTGCTCTGCTGGACTGCATTATGTACGAGGCCGCCACACAGGGCAGCTACAAGACCCCT
AAACTGACCCCTCTGCTGCCTACCGATCTGGTGTTTAGAGCCGGCGCACCCAAAGTGACACTG

[0733] Hence, preferably the RNA construct is encoded by a DNA sequence substantially as set out in SEQ ID No: 365, or a fragment or variant thereof.

[0734] In an embodiment, the RNA sequence corresponding to the codon optimised DNA sequence of SEQ ID No: 365 is provided herein as SEQ ID No: 366, as follows:

[SEQ ID No: 366]
AUGAGCAACAGCAAAGAAGUCAAGAGCUUCCUCUGGACACAGGCCCUGAGAAGAGAGCUGAGCCCUUACUGCACCAGC
GUGAAGCUGCAAGUGAUCAAGGACGCCCAGAGCCUGCUGCACAGCCUGGAUUUUUCCGAGGUGUCCAACGUGCAGCGG
CUGAUGCGGAAGGACAAGAGAGAUGACGGCGACCUGAAGCGGCUGAGGGAUCUGAAUCAGGCCGUGAACAACCUGGUG
GAACUGAAGUCCCAGCAGCAGAAAAACGUGCUGAGCGUGGGCCAGCUGAGCAGCGACGAUCUGCUUGUUCUGGCCGCC
GACAUCGACAGACUGAAGGCCAAGAUCACCAGAACCGAGCGGCCUCAGAGCAACGGCGUGUACAUGGGAAAUCUGACA
GCCCAGCAGCUGGAACAGCGGAAGAAACUGCUGGAACUCGUGGGCAUGACCCGGCCUAAUCUGAGAGCUGGCUCUGAU
GGCGUCGUCAGAGUGUGGGACGUGAAGAACCCCGACCUGCUGAACAACCAGUUCGGCACCAUGCCUAGCCUGACAAUC
GCCUGCAUGACCAAGCAGGGCCAGAGCGACAUCAACGAUGUGGUGCAGGCACUGACCGACCUGGGCCUGAUCUACACC
GCCAAGUAUCCCAACAGCAGCGACCUGGAUCAGCUGGUCAAGACACACCCUGUGCUGGGCAUCAUCGACACCGAGAAG
UCCGCCAUCAACGUGUCCGGCUACAACUUCUCUCUGUCUGCCGCCGUGAAAGCCGGCGCUUGUAUGCUGGAUGGCGGC
AACAUGCUGGAAACCAUCAAAGUGACCCCUCAGAACAUCGACCCCAUCCUGAAGAAAACCCUGGCCGUGAAGAAAAGC
GUGGGGAUGUUCGUGUCUGACACCCCUGGCGACAGAAACCCCUACGAGAACCUGCUGUACAAGAUCUGCCUGAGCGGC
AACGGCUGGCCCUAUAUCGCCAGCAGAACCAGCAUUCUGGGCAGAGCCUGGGACAACACCGUGGUGGAUCUGGGCAGC
AGCAACCCCAUCACCAAGCCUCUGAACCAGCAGGCCAGAGAUAAGGUGCCAGGCCUGCAGCAGACAGUGGGCCUGACA
UACAGCCAGAUCAUGUGCCUGAAGGACAUCAUGACCGGCAUGGACCCCACCAGCAAGACAUGGAUCGACAUCGAGGGC
AGAGCUGAGGACCCUGUGGAAAUCGCCAUCUACCAACCUGCCGGCGGACAGUACAUCCACUUCUACAGAGAGCCCACC
GACGCCAAGCAGUUCAAGCAGGACAGCAAGUACAGCCACGGCAUCGAUAUCGUGGACCUGUUCAGAGUGCAGCCCGGA
CUGACAUCUGCCGUGAUCGAGUCUCUGCCCAAAGGCAUGGUCCUGACCUGUCAGGGCAGCGAGGACAUCAGAAAGCUG
CUCGACAGCCAGGGCAGAAGAGACAUCAAGCUGAUCGACGUGAUGAUGAGCAAGAUCGACGCCCGGAAGUUCGAGAAC
GAAGUGUGGGAUGACCUGAAAACCCUCUGCAACAUGCACACCGGCGUGGUGCACGAGAAGAAGAAGAGAGGCGGCAAG
CAAGAGAUCACCCCUCACUGUGCUCUGCUGGACUGCAUUAUGUACGAGGCCGCCACACAGGGCAGCUACAAGACCCCU
AAACUGACCCCUCUGCUGCCUACCGAUCUGGUGUUUAGAGCCGGCGCACCCAAAGUGACACUG

[0735] Hence, preferably the RNA construct comprises a sequence substantially as set out in SEQ ID No: 366, or a fragment or variant thereof.

[0736] In one embodiment, the at least one IIP is HCV NS3 protein (P27958; Genome polyprotein Hepatitis C virus genotype 1a (isolate H77)), or an orthologue thereof. One embodiment of the polypeptide sequence of HCV NS3 protein is represented herein as SEQ ID No: 367, as follows:

[SEQ ID No: 367]
APITAYAQQTRGLLGCIITSLTGRDKNQVEGEVQIVSTATQTFLATCINGVCWTVYHGAGTRTIASPKGPVIQTYTNV
DQDLVGWPAPQGSRSLTPCTCGSSDLYLVTRHADVIPVRRRGDSRGSLLSPRPISYLKGSSGGPLLCPTGHAVGLFRA
AVCTRGVAKAVDFIPVENLETTMRSPVFTDNSSPPAVPQSFQVAHLHAPTGSGKSTKVPAAYAAKGYKVLVLNPSVAA
TLGFGAYMSKAHGVDPNIRTGVRTITTGSPITYSTYGKFLADAGCSGGAYDIIICDECHSTDATSISGIGTVLDQAET
AGARLVVLATATPPGSVTVSHPNIEEVALSTTGEIPFYGKAIPLEVIKGGRHLIFCHSKKKCDELAAKLVALGINAVA
YYRGLDVSVIPTSGDVVVVSTDALMTGFTGDFDSVIDCNTCVTQTVDFSLDPTFTIETTTLPQDAVSRTQRRGRTGRG
KPGIYRFVAPGERPSGMFDSSVLCECYDAGCAWYELTPAETTVRLRAYMNTPGLPVCQDHLGFWEGVFTGLTHIDAHF
LSQTKQSGENFPYLVAYQATVCARAQAPPPSWDQMRKCLIRLKPTLHGPTPLLYRLGAVQNEVTLTHPITKYIMTCMS
ADLEVVT

[0737] Therefore, preferably the RNA construct comprises a nucleotide sequence which encodes an amino acid sequence substantially as set out in SEQ ID No: 367, or a variant or fragment thereof.

[0738] In one embodiment, the HCV NS3 polypeptide is encoded by the DNA nucleotide sequence of SEQ ID No: 368, as follows:

[SEQ ID No: 368]
GCGCCCATCACGGCGTACGCCCAGCAGACGAGAGGCCTCCTAGGGTGTATAATCACCAGCCTGACTGGCCGGGACAAA
AACCAAGTGGAGGGTGAGGTCCAGATCGTGTCAACTGCTACCCAGACCTTCCTGGCAACGTGCATCAATGGGGTATGC
TGGACTGTCTACCACGGGGCCGGAACGAGGACCATCGCATCACCCAAGGGTCCTGTCATCCAGACGTATACCAATGTG
GATCAAGACCTCGTGGGCTGGCCCGCTCCTCAAGGTTCCCGCTCATTGACACCCTGCACCTGCGGCTCCTCGGACCTT
TACCTGGTCACGAGGCACGCCGATGTCATTCCCGTGCGCCGGCGAGGTGATAGCAGGGGTAGCCTGCTTTCGCCCCGG
CCCATTTCCTACTTGAAAGGCTCCTCGGGGGGTCCGCTGTTGTGCCCCACGGGACACGCCGTGGGCCTATTCAGGGCC
GCGGTGTGCACCCGTGGAGTGGCTAAGGCGGTGGACTTTATCCCTGTGGAGAACCTAGAGACAACCATGAGATCCCCG
GTGTTCACGGACAACTCCTCTCCACCAGCAGTGCCCCAGAGCTTCCAGGTGGCCCACCTGCATGCTCCCACCGGCAGC
GGTAAGAGCACCAAGGTCCCGGCTGCGTACGCAGCCAAGGGCTACAAGGTGTTGGTGCTCAACCCCTCTGTTGCTGCA
ACACTGGGCTTTGGTGCTTACATGTCCAAGGCCCATGGGGTTGATCCTAATATCAGGACCGGGGTGAGAACAATTACC
ACTGGCAGCCCCATCACGTACTCCACCTACGGCAAGTTCCTTGCCGACGCCGGGTGCTCAGGAGGTGCTTATGACATA
ATAATTTGTGACGAGTGCCACTCCACGGATGCCACATCCATCTCGGGCATCGGCACTGTCCTTGACCAAGCAGAGACT
GCGGGGGCGAGACTGGTTGTGCTCGCCACTGCTACCCCTCCGGGCTCCGTCACTGTGTCCCATCCTAACATCGAGGAG
GTTGCTCTGTCCACCACCGGAGAGATCCCCTTTTACGGCAAGGCTATCCCCCTCGAGGTGATCAAGGGGGGAAGACAT
CTCATCTTCTGCCACTCAAAGAAGAAGTGCGACGAGCTCGCCGCGAAGCTGGTCGCATTGGGCATCAATGCCGTGGCC
TACTACCGCGGTCTTGACGTGTCTGTCATCCCGACCAGCGGCGATGTTGTCGTCGTGTCGACCGATGCTCTCATGACT
GGCTTTACCGGCGACTTCGACTCTGTGATAGACTGCAACACGTGTGTCACTCAGACAGTCGATTTTAGCCTTGACCCT
ACCTTTACCATTGAGACAACCACGCTCCCCCAGGATGCTGTCTCCAGGACTCAACGCCGGGGCAGGACTGGCAGGGGG
AAGCCAGGCATCTATAGATTTGTGGCACCGGGGGAGCGCCCCTCCGGCATGTTCGACTCGTCCGTCCTCTGTGAGTGC
TATGACGCGGGCTGTGCTTGGTATGAGCTCACGCCCGCCGAGACTACAGTTAGGCTACGAGCGTACATGAACACCCCG
GGGCTTCCCGTGTGCCAGGACCATCTTGGATTTTGGGAGGGCGTCTTTACGGGCCTCACTCATATAGATGCCCACTTT
CTATCCCAGACAAAGCAGAGTGGGGAGAACTTTCCTTACCTGGTAGCGTACCAAGCCACCGTGTGCGCTAGGGCTCAA
GCCCCTCCCCCATCGTGGGACCAGATGCGGAAGTGTTTGATCCGCCTTAAACCCACCCTCCATGGGCCAACACCCCTG
CTATACAGACTGGGCGCTGTTCAGAATGAAGTCACCCTGACGCACCCAATCACCAAATACATCATGACATGCATGTCG
GCCGACCTGGAGGTCGTCACG

[0739] Accordingly, preferably the HCV NS3 polypeptide is encoded by the DNA nucleotide sequence substantially as set out in SEQ ID NO: 368, or a variant or fragment thereof.

[0740] One embodiment of codon optimised nucleic acid (DNA) encoding the HCV NS3 polypeptide is provided herein as SEQ ID No: 369, as follows:

[SEQ ID No: 369]
GCCCCTATCACAGCCTACGCTCAGCAGACAAGAGGCCTGCTGGGCTGCATCATCACAAGCCTGACCGGCAGAGACAAG
AACCAGGTGGAAGGCGAGGTGCAGATCGTGTCTACAGCTACCCAGACCTTCCTGGCCACCTGTATCAATGGCGTGTGC
TGGACCGTGTATCACGGCGCTGGCACCAGAACAATCGCCTCTCCAAAGGGCCCTGTGATCCAGACCTACACCAACGTG
GACCAGGATCTCGTTGGCTGGCCTGCTCCTCAGGGCAGCAGATCTCTGACCCCTTGTACATGCGGCAGCAGCGACCTG
TACCTGGTCACAAGACACGCCGACGTGATCCCCGTCAGAAGAAGAGGCGATAGCAGAGGCAGCCTGCTGAGCCCTAGA
CCTATCAGCTACCTGAAGGGCAGCTCTGGCGGACCTCTGCTGTGTCCAACAGGACATGCCGTGGGCCTGTTTAGAGCC
GCCGTGTGTACAAGAGGCGTGGCCAAAGCCGTGGACTTCATCCCCGTGGAAAACCTGGAAACCACCATGCGGAGCCCC
GTGTTCACCGACAATTCTAGCCCTCCAGCCGTGCCTCAGAGCTTCCAAGTGGCTCATCTGCATGCCCCTACAGGCAGC
GGCAAGAGCACAAAAGTGCCTGCCGCCTATGCCGCCAAGGGCTATAAGGTGCTGGTGCTGAATCCCAGCGTGGCCGCC
ACACTTGGCTTTGGCGCCTATATGTCTAAAGCCCACGGCGTGGACCCCAACATCAGAACCGGCGTGCGGACAATCACA
ACAGGCAGCCCTATCACCTACTCTACCTACGGCAAGTTCCTGGCCGATGCCGGATGTTCTGGCGGAGCCTACGACATC
ATCATCTGCGACGAGTGCCACAGCACCGACGCCACATCTATCTCTGGCATCGGCACCGTGCTGGATCAGGCCGAAACA
GCTGGTGCTAGACTGGTGGTGCTGGCCACAGCTACACCTCCAGGCTCTGTGACAGTGTCTCACCCCAATATCGAGGAA
GTGGCCCTGTCTACAACCGGCGAGATCCCATTCTATGGCAAGGCCATTCCTCTGGAAGTGATCAAAGGCGGCAGACAC
CTGATCTTTTGCCACTCCAAGAAGAAGTGCGACGAGCTGGCCGCCAAACTGGTGGCCCTTGGAATCAATGCCGTGGCC
TACTACAGAGGACTGGACGTGTCCGTGATTCCCACATCTGGCGACGTGGTGGTGGTGTCCACTGATGCCCTGATGACC
GGCTTCACCGGCGACTTCGATAGCGTGATCGACTGCAATACCTGCGTGACCCAGACCGTGGATTTCTCTCTGGACCCC
ACCTTCACCATCGAGACAACCACACTGCCTCAGGACGCCGTGTCTCGGACACAGAGAAGAGGCAGAACCGGAAGAGGC
AAGCCCGGCATCTACAGATTTGTGGCCCCTGGCGAAAGACCCAGCGGCATGTTTGATAGCAGCGTGCTGTGCGAGTGC
TACGATGCTGGCTGTGCTTGGTACGAGCTGACCCCTGCCGAGACTACCGTTAGACTGCGGGCCTACATGAACACCCCT
GGCCTGCCTGTGTGTCAGGACCACCTCGGATTTTGGGAGGGCGTGTTCACAGGACTGACCCACATCGACGCCCACTTT
CTGAGCCAGACAAAGCAGAGCGGCGAGAACTTCCCTTACCTGGTGGCTTACCAGGCCACCGTGTGTGCTAGAGCACAA
GCCCCTCCACCTAGCTGGGACCAGATGAGGAAGTGCCTGATCCGGCTGAAGCCTACACTGCACGGACCAACACCACTG
CTGTATAGACTGGGCGCCGTGCAGAACGAAGTGACCCTGACACATCCCATCACCAAGTACATCATGACCTGCATGAGC
GCCGACCTGGAAGTGGTCACA

[0741] Hence, preferably the RNA construct is encoded by a DNA sequence substantially as set out in SEQ ID No: 369, or a fragment or variant thereof.

[0742] In an embodiment, the RNA sequence corresponding to the codon optimised DNA sequence of SEQ ID No: 369 is provided herein as SEQ ID No: 370, as follows:

[SEQ ID No: 370]
GCCCCUAUCACAGCCUACGCUCAGCAGACAAGAGGCCUGCUGGGCUGCAUCAUCACAAGCCUGACCGGCAGAGACAAG
AACCAGGUGGAAGGCGAGGUGCAGAUCGUGUCUACAGCUACCCAGACCUUCCUGGCCACCUGUAUCAAUGGCGUGUGC
UGGACCGUGUAUCACGGCGCUGGCACCAGAACAAUCGCCUCUCCAAAGGGCCCUGUGAUCCAGACCUACACCAACGUG
GACCAGGAUCUCGUUGGCUGGCCUGCUCCUCAGGGCAGCAGAUCUCUGACCCCUUGUACAUGCGGCAGCAGCGACCUG
UACCUGGUCACAAGACACGCCGACGUGAUCCCCGUCAGAAGAAGAGGCGAUAGCAGAGGCAGCCUGCUGAGCCCUAGA
CCUAUCAGCUACCUGAAGGGCAGCUCUGGCGGACCUCUGCUGUGUCCAACAGGACAUGCCGUGGGCCUGUUUAGAGCC
GCCGUGUGUACAAGAGGCGUGGCCAAAGCCGUGGACUUCAUCCCCGUGGAAAACCUGGAAACCACCAUGCGGAGCCCC
GUGUUCACCGACAAUUCUAGCCCUCCAGCCGUGCCUCAGAGCUUCCAAGUGGCUCAUCUGCAUGCCCCUACAGGCAGC
GGCAAGAGCACAAAAGUGCCUGCCGCCUAUGCCGCCAAGGGCUAUAAGGUGCUGGUGCUGAAUCCCAGCGUGGCCGCC
ACACUUGGCUUUGGCGCCUAUAUGUCUAAAGCCCACGGCGUGGACCCCAACAUCAGAACCGGCGUGCGGACAAUCACA
ACAGGCAGCCCUAUCACCUACUCUACCUACGGCAAGUUCCUGGCCGAUGCCGGAUGUUCUGGCGGAGCCUACGACAUC
AUCAUCUGCGACGAGUGCCACAGCACCGACGCCACAUCUAUCUCUGGCAUCGGCACCGUGCUGGAUCAGGCCGAAACA
GCUGGUGCUAGACUGGUGGUGCUGGCCACAGCUACACCUCCAGGCUCUGUGACAGUGUCUCACCCCAAUAUCGAGGAA
GUGGCCCUGUCUACAACCGGCGAGAUCCCAUUCUAUGGCAAGGCCAUUCCUCUGGAAGUGAUCAAAGGCGGCAGACAC
CUGAUCUUUUGCCACUCCAAGAAGAAGUGCGACGAGCUGGCCGCCAAACUGGUGGCCCUUGGAAUCAAUGCCGUGGCC
UACUACAGAGGACUGGACGUGUCCGUGAUUCCCACAUCUGGCGACGUGGUGGUGGUGUCCACUGAUGCCCUGAUGACC
GGCUUCACCGGCGACUUCGAUAGCGUGAUCGACUGCAAUACCUGCGUGACCCAGACCGUGGAUUUCUCUCUGGACCCC
ACCUUCACCAUCGAGACAACCACACUGCCUCAGGACGCCGUGUCUCGGACACAGAGAAGAGGCAGAACCGGAAGAGGC
AAGCCCGGCAUCUACAGAUUUGUGGCCCCUGGCGAAAGACCCAGCGGCAUGUUUGAUAGCAGCGUGCUGUGCGAGUGC
UACGAUGCUGGCUGUGCUUGGUACGAGCUGACCCCUGCCGAGACUACCGUUAGACUGCGGGCCUACAUGAACACCCCU
GGCCUGCCUGUGUGUCAGGACCACCUCGGAUUUUGGGAGGGCGUGUUCACAGGACUGACCCACAUCGACGCCCACUUU
CUGAGCCAGACAAAGCAGAGCGGCGAGAACUUCCCUUACCUGGUGGCUUACCAGGCCACCGUGUGUGCUAGAGCACAA
GCCCCUCCACCUAGCUGGGACCAGAUGAGGAAGUGCCUGAUCCGGCUGAAGCCUACACUGCACGGACCAACACCACUG
CUGUAUAGACUGGGCGCCGUGCAGAACGAAGUGACCCUGACACAUCCCAUCACCAAGUACAUCAUGACCUGCAUGAGC
GCCGACCUGGAAGUGGUCACA

[0743] Hence, preferably the RNA construct comprises a sequence substantially as set out in SEQ ID No: 370, or a fragment or variant thereof.

[0744] In one embodiment, the at least one IIP is DENV 1 NS4A protein (P17763; Genome polyprotein Dengue virus type 1 (strain Nauru/West Pac/1974)), or an orthologue thereof. One embodiment of the polypeptide sequence of DENV 1 NS4A protein is represented herein as SEQ ID No: 371, as follows:

[SEQ ID No: 371]
SVSGDLILEIGKLPQHLTQRAQNALDNLVMLHNSEQGGKAYRHAMEELPDTIETLMLLALIAVLTGGVTLFFLSGRGL
GKTSIGLLCVIASSALLWMASVEPHWIAASIILEFFLMVLLIPEPDRQR

[0745] Therefore, preferably the RNA construct comprises a nucleotide sequence which encodes an amino acid sequence substantially as set out in SEQ ID No: 371, or a variant or fragment thereof.

[0746] In one embodiment, the DENV 1 NS4A polypeptide is encoded by the DNA nucleotide sequence of SEQ ID No: 372, as follows:

[SEQ ID No: 372]
AGCGTCTCAGGTGACCTAATATTAGAAATAGGGAAACTTCCACAACATTTAACGCAAAGGGCCCAGAACGCCTTGGAC
AATCTGGTTATGTTGCACAACTCTGAACAAGGAGGAAAAGCCTATAGACACGCCATGGAAGAACTACCAGACACCATA
GAAACGTTAATGCTCCTAGCTTTGATAGCTGTGCTGACTGGTGGAGTGACGTTGTTCTTCCTATCAGGAAGGGGTCTA
GGAAAAACATCCATTGGCCTACTCTGCGTGATTGCCTCAAGCGCACTGCTATGGATGGCCAGTGTGGAACCCCATTGG
ATAGCGGCCTCTATCATACTGGAGTTCTTTCTGATGGTGTTGCTTATTCCAGAGCCGGACAGACAGCGC

[0747] Accordingly, preferably the DENV 1 NS4A polypeptide is encoded by the DNA nucleotide sequence substantially as set out in SEQ ID NO: 372, or a variant or fragment thereof.

[0748] One embodiment of codon optimised nucleic acid (DNA) encoding the DENV 1 NS4A polypeptide is provided herein as SEQ ID No: 373, as follows:

[SEQ ID No: 373]
TCCGTTAGCGGCGACCTGATCCTGGAAATCGGCAAGCTGCCTCAGCACCTGACACAGAGAGCACAGAACGCCCTGGAC
AACCTGGTCATGCTGCACAACTCTGAGCAAGGCGGCAAGGCCTACAGACACGCCATGGAAGAACTGCCCGACACCATC
GAGACACTGATGCTGCTGGCCCTGATCGCTGTTCTGACAGGCGGAGTGACCCTGTTCTTCCTGTCTGGCAGAGGCCTG
GGCAAGACCTCTATCGGACTGCTGTGTGTGATCGCCAGCTCTGCCCTGCTGTGGATGGCTTCTGTGGAACCTCATTGG
ATCGCCGCCTCTATTATCCTGGAATTCTTCCTGATGGTGCTGCTGATCCCCGAGCCTGACAGACAGAGA

[0749] Hence, preferably the RNA construct is encoded by a DNA sequence substantially as set out in SEQ ID No: 373, or a fragment or variant thereof.

[0750] In an embodiment, the RNA sequence corresponding to the codon optimised DNA sequence of SEQ ID No: 373 is provided herein as SEQ ID No: 374, as follows:

[SEQ ID No: 374]
UCCGUUAGCGGCGACCUGAUCCUGGAAAUCGGCAAGCUGCCUCAGCACCUGACACAGAGAGCACAGAACGCCCUGGAC
AACCUGGUCAUGCUGCACAACUCUGAGCAAGGCGGCAAGGCCUACAGACACGCCAUGGAAGAACUGCCCGACACCAUC
GAGACACUGAUGCUGCUGGCCCUGAUCGCUGUUCUGACAGGCGGAGUGACCCUGUUCUUCCUGUCUGGCAGAGGCCUG
GGCAAGACCUCUAUCGGACUGCUGUGUGUGAUCGCCAGCUCUGCCCUGCUGUGGAUGGCUUCUGUGGAACCUCAUUGG
AUCGCCGCCUCUAUUAUCCUGGAAUUCUUCCUGAUGGUGCUGCUGAUCCCCGAGCCUGACAGACAGAGA

[0751] Hence, preferably the RNA construct comprises a sequence substantially as set out in SEQ ID No: 374, or a fragment or variant thereof.

[0752] In one embodiment, the at least one IIP is DENV 1 NS2A (P17763; Genome polyprotein Dengue virus type 1 (strain Nauru/West Pac/1974)), or an orthologue thereof. One embodiment of the polypeptide sequence of DENV 1 NS2A is represented herein as SEQ ID No: 375, as follows:

[SEQ ID No: 375]
GSGEVDSFSLGLLCISIMIEEVMRSRWSRKMLMTGTLAVFLLLTMGQLTWNDLIRLCIMVGANASDKMGMGTTYLALM
ATFRMRPMFAVGLLFRRLTSREVLLLTVGLSLVASVELPNSLEELGDGLAMGIMMLKLLTDFQSHQLWATLLSLTFVK
TTFSLHYAWKTMAMILSIVSLFPLCLSTTSQKTTWLPVLLGSLGCKPLTMFLITENKIWGRK

[0753] Therefore, preferably the RNA construct comprises a nucleotide sequence which encodes an amino acid sequence substantially as set out in SEQ ID No: 375, or a variant or fragment thereof.

[0754] In one embodiment, the DENV 1 NS2A polypeptide is encoded by the DNA nucleotide sequence of SEQ ID No: 376, as follows:

[SEQ ID No: 376]
GGGTCAGGAGAAGTGGACAGTTTTTCACTAGGACTGCTATGCATATCAATAATGATCGAAGAGGTAATGAGATCCAGA
TGGAGCAGAAAAATGCTGATGACTGGAACATTGGCTGTGTTCCTCCTTCTCACAATGGGACAATTGACATGGAATGAT
CTGATCAGGCTATGTATCATGGTTGGAGCCAACGCTTCAGACAAGATGGGGATGGGAACAACGTACCTAGCTTTGATG
GCCACTTTCAGAATGAGACCAATGTTCGCAGTCGGGCTACTGTTTCGCAGATTAACATCTAGAGAAGTTCTTCTTCTT
ACAGTTGGATTGAGTCTGGTGGCATCTGTAGAACTACCAAATTCCTTAGAGGAGCTAGGGGATGGACTTGCAATGGGC
ATCATGATGTTGAAATTACTGACTGATTTTCAGTCACATCAGCTATGGGCTACCTTGCTGTCTTTAACATTTGTCAAA
ACAACTTTTTCATTGCACTATGCATGGAAGACAATGGCTATGATACTGTCAATTGTATCTCTCTTCCCTTTATGCCTG
TCCACGACTTCTCAAAAAACAACATGGCTTCCGGTGTTGCTGGGATCTCTTGGATGCAAACCACTAACCATGTTTCTT
ATAACAGAAAACAAAATCTGGGGAAGGAAA

[0755] Accordingly, preferably the DENV 1 NS2A polypeptide is encoded by the DNA nucleotide sequence substantially as set out in SEQ ID NO: 376, or a variant or fragment thereof.

[0756] One embodiment of codon optimised nucleic acid (DNA) encoding the DENV 1 NS2A polypeptide is provided herein as SEQ ID No: 377, as follows:

[SEQ ID No: 377]
GGATCTGGCGAGGTGGACTCTTTTTCTCTGGGCCTGCTGTGCATCAGCATCATGATCGAGGAAGTGATGCGGAGCCGC
TGGTCCCGGAAAATGCTGATGACTGGAACCCTGGCCGTGTTCCTGCTGCTGACAATGGGACAGCTGACCTGGAACGAC
CTGATCCGGCTGTGTATCATGGTCGGAGCCAACGCCAGCGACAAGATGGGCATGGGCACAACCTATCTGGCCCTGATG
GCCACCTTCCGGATGAGGCCTATGTTTGCCGTGGGACTGCTGTTCAGAAGGCTGACCTCTAGAGAGGTGCTGCTGCTC
ACAGTGGGCCTGTCTCTGGTGGCTTCTGTGGAACTGCCCAACAGCCTGGAAGAACTCGGAGATGGACTGGCCATGGGC
ATTATGATGCTCAAGCTGCTGACCGACTTCCAGAGCCACCAGCTGTGGGCTACACTGCTGAGCCTGACCTTCGTGAAA
ACCACCTTCAGCCTGCACTACGCCTGGAAAACAATGGCCATGATCCTGAGCATCGTGTCTCTGTTCCCTCTGTGCCTG
AGCACCACCAGCCAGAAAACCACATGGCTGCCTGTGCTGCTGGGCTCTCTGGGCTGTAAACCCCTGACCATGTTCCTG
ATCACCGAGAACAAGATCTGGGGCAGAAAG

[0757] Hence, preferably the RNA construct is encoded by a DNA sequence substantially as set out in SEQ ID No: 377, or a fragment or variant thereof.

[0758] In an embodiment, the RNA sequence corresponding to the codon optimised DNA sequence of SEQ ID No: 377 is provided herein as SEQ ID No: 378, as follows:

[SEQ ID No: 378]
GGAUCUGGCGAGGUGGACUCUUUUUCUCUGGGCCUGCUGUGCAUCAGCAUCAUGAUCGAGGAAGUGAUGCGGAGCCGC
UGGUCCCGGAAAAUGCUGAUGACUGGAACCCUGGCCGUGUUCCUGCUGCUGACAAUGGGACAGCUGACCUGGAACGAC
CUGAUCCGGCUGUGUAUCAUGGUCGGAGCCAACGCCAGCGACAAGAUGGGCAUGGGCACAACCUAUCUGGCCCUGAUG
GCCACCUUCCGGAUGAGGCCUAUGUUUGCCGUGGGACUGCUGUUCAGAAGGCUGACCUCUAGAGAGGUGCUGCUGCUC
ACAGUGGGCCUGUCUCUGGUGGCUUCUGUGGAACUGCCCAACAGCCUGGAAGAACUCGGAGAUGGACUGGCCAUGGGC
AUUAUGAUGCUCAAGCUGCUGACCGACUUCCAGAGCCACCAGCUGUGGGCUACACUGCUGAGCCUGACCUUCGUGAAA
ACCACCUUCAGCCUGCACUACGCCUGGAAAACAAUGGCCAUGAUCCUGAGCAUCGUGUCUCUGUUCCCUCUGUGCCUG
AGCACCACCAGCCAGAAAACCACAUGGCUGCCUGUGCUGCUGGGCUCUCUGGGCUGUAAACCCCUGACCAUGUUCCUG
AUCACCGAGAACAAGAUCUGGGGCAGAAAG

[0759] Hence, preferably the RNA construct comprises a sequence substantially as set out in SEQ ID No: 378, or a fragment or variant thereof.

[0760] In one embodiment, the at least one IIP is DENV 2 NS2A (P29990; Genome polyprotein Dengue virus type 2 (strain Thailand/16681/1984)), or an orthologue thereof. One embodiment of the polypeptide sequence of DENV 2 NS2A is represented herein as SEQ ID No: 379, as follows:

[SEQ ID No: 379]
GHGQVDNFSLGVLGMALFLEEMLRTRVGTKHAILLVAVSFVTLIIGNMSFRDLGRVMVMVGATMTDDIGMGVTYLALL
AAFKVRPTFAAGLLLRKLTSKALMMTTIGIVLSSQSTTPETILELTDALALGMMVLKMVRNMEKYQLAVTIMAILCVP
NAVILQNAWKVSCTILAVVSVSPLFLTSSQQKTDWIPLALTIKGLNPTAIFLTTLSRISKKR

[0761] Therefore, preferably the RNA construct comprises a nucleotide sequence which encodes an amino acid sequence substantially as set out in SEQ ID No: 379, or a variant or fragment thereof.

[0762] In one embodiment, the DENV 2 NS2A polypeptide is encoded by the DNA nucleotide sequence of SEQ ID No: 380, as follows:

[SEQ ID No: 380]
GGACATGGGCAGGTCGACAACTTTTCACTAGGAGTCTTGGGAATGGCATTGTTCCTGGAGGAAATGCTTAGGACCCGA
GTAGGAACGAAACATGCAATACTACTAGTTGCAGTTTCTTTTGTGACATTGATCATAGGGAACATGTCCTTTAGAGAC
CTGGGAAGAGTAATGGTTATGGTAGGCGCCACTATGACGGATGACATAGGTATGGGCGTGACTTATCTTGCCCTACTA
GCAGCCTTCAAAGTCAGACCAACTTTTGCAGCTGGACTACTCTTGAGAAAGCTGACCTCCAAGGCATTGATGATGACT
ACTATAGGAATTGTACTCTCCTCCCAGAGCACTACACCAGAGACCATTCTTGAGTTGACTGATGCGTTAGCCTTAGGC
ATGATGGTCCTCAAAATGGTGAGAAATATGGAAAAGTATCAATTGGCAGTGACTATCATGGCTATCTTGTGCGTCCCA
AACGCAGTGATATTACAAAACGCATGGAAAGTGAGTTGCACGATATTGGCAGTGGTGTCCGTTTCCCCACTGTTCTTA
ACATCCTCACAGCAAAAAACGGATTGGATACCATTAGCGTTGACGATCAAAGGTCTCAATCCAACAGCTATTTTTCTA
ACAACCCTCTCAAGAACCAGCAAGAAAAGG

[0763] Accordingly, preferably the DENV 2 NS2A polypeptide is encoded by the DNA nucleotide sequence substantially as set out in SEQ ID NO: 380, or a variant or fragment thereof.

[0764] One embodiment of codon optimised nucleic acid (DNA) encoding the DENV 2 NS2A polypeptide is provided herein as SEQ ID No: 381, as follows:

[SEQ ID No: 381]
GGACACGGACAGGTGGACAATTTTTCCCTGGGCGTGCTCGGCATGGCCCTGTTTCTGGAAGAGATGCTGAGAACCAGA
GTGGGCACCAAGCACGCCATTCTGCTGGTGGCCGTGTCCTTCGTGACACTGATCATCGGCAACATGAGCTTCCGCGAC
CTGGGCAGAGTGATGGTCATGGTCGGAGCCACCATGACCGACGATATCGGCATGGGCGTGACCTATCTGGCTCTGCTG
GCCGCTTTTAAAGTGCGGCCTACATTTGCCGCCGGACTGCTGCTGAGAAAGCTGACATCTAAGGCCCTGATGATGACC
ACCATCGGCATCGTGCTGAGCAGCCAGAGCACCACACCTGAGACAATCCTGGAACTGACCGACGCTCTGGCCCTGGGA
ATGATGGTGCTGAAGATGGTCCGAAACATGGAAAAGTACCAGCTGGCCGTGACCATCATGGCCATCCTGTGTGTGCCC
AACGCCGTGATCCTGCAGAACGCCTGGAAGGTGTCCTGTACCATCCTGGCCGTGGTGTCTGTGTCCCCTCTGTTTCTG
ACCAGCAGCCAGCAGAAAACCGACTGGATCCCACTGGCTCTGACCATCAAGGGCCTGAATCCTACCGCCATCTTCCTG
ACCACACTGAGCCGGACCAGCAAGAAGAGA

[0765] Hence, preferably the RNA construct is encoded by a DNA sequence substantially as set out in SEQ ID No: 381, or a fragment or variant thereof.

[0766] In an embodiment, the RNA sequence corresponding to the codon optimised DNA sequence of SEQ ID No: 381 is provided herein as SEQ ID No: 382, as follows:

[SEQ ID No: 382]
GGACACGGACAGGUGGACAAUUUUUCCCUGGGCGUGCUCGGCAUGGCCCUGUUUCUGGAAGAGAUGCUGAGAACCAGA
GUGGGCACCAAGCACGCCAUUCUGCUGGUGGCCGUGUCCUUCGUGACACUGAUCAUCGGCAACAUGAGCUUCCGCGAC
CUGGGCAGAGUGAUGGUCAUGGUCGGAGCCACCAUGACCGACGAUAUCGGCAUGGGCGUGACCUAUCUGGCUCUGCUG
GCCGCUUUUAAAGUGCGGCCUACAUUUGCCGCCGGACUGCUGCUGAGAAAGCUGACAUCUAAGGCCCUGAUGAUGACC
ACCAUCGGCAUCGUGCUGAGCAGCCAGAGCACCACACCUGAGACAAUCCUGGAACUGACCGACGCUCUGGCCCUGGGA
AUGAUGGUGCUGAAGAUGGUCCGAAACAUGGAAAAGUACCAGCUGGCCGUGACCAUCAUGGCCAUCCUGUGUGUGCCC
AACGCCGUGAUCCUGCAGAACGCCUGGAAGGUGUCCUGUACCAUCCUGGCCGUGGUGUCUGUGUCCCCUCUGUUUCUG
ACCAGCAGCCAGCAGAAAACCGACUGGAUCCCACUGGCUCUGACCAUCAAGGGCCUGAAUCCUACCGCCAUCUUCCUG
ACCACACUGAGCCGGACCAGCAAGAAGAGA

[0767] Hence, preferably the RNA construct comprises a sequence substantially as set out in SEQ ID No: 382, or a fragment or variant thereof.

[0768] In one embodiment, the at least one IIP is DENV 4 NS2A (P09866; Genome polyprotein Dengue virus type 4 (strain Dominica/814669/1981)), or an orthologue thereof. One embodiment of the polypeptide sequence of DENV 4 NS2A is represented herein as SEQ ID No: 383, as follows:

[SEQ ID No: 383]
GQGTSETFSMGLLCLTLFVEECLRRRVTRKHMILVVVITLCAIILGGLTWMDLLRALIMLGDTMSGRIGGQIHLAIMA
VFKMSPGYVLGVFLRKLTSRETALMVIGMAMTTVLSIPHDLMELIDGISLGLILLKIVTQFDNTQVGTLALSLTFIRS
TMPLVMAWRTIMAVLFVVTLIPLCRTSCLQKQSHWVEITALILGAQALPVYLMTLMKGASRR

[0769] Therefore, preferably the RNA construct comprises a nucleotide sequence which encodes an amino acid sequence substantially as set out in SEQ ID No: 383, or a variant or fragment thereof.

[0770] In one embodiment, the DENV 4 NS2A polypeptide is encoded by the DNA nucleotide sequence of SEQ ID No: 384, as follows:

[SEQ ID No: 384]
GGACAGGGCACATCAGAAACTTTTTCTATGGGTCTGTTGTGCCTGACCTTGTTTGTGGAAGAATGCTTGAGGAGAAGA
TTACTACGAGCCCTCATCATGTTGGGGGACACTATGTCTGGTAGAATAGGAGGACAGATCCACCTAGCCATCATGGCA
GTGTTCAAGATGTCACCAGGATACGTGCTGGGTGTGTTTTTAAGGAAACTCACTTCAAGAGAGACAGCACTAATGGTA
ATAGGAATGGCCATGACAACGGTGCTTTCAATTCCACATGACCTTATGGAACTCATTGATGGAATATCACTGGGACTA
AGCTGTCTTCAAAAACAGTCTCATTGGGTAGAAATAACAGCACTCATCCTAGGAGCCCAAGCTCTGCCAGTGTACCTA
ATGACTCTTATGAAAGGAGCCTCAAGAAGA

[0771] Accordingly, preferably the DENV 4 NS2A polypeptide is encoded by the DNA nucleotide sequence substantially as set out in SEQ ID NO: 384, or a variant or fragment thereof.

[0772] One embodiment of codon optimised nucleic acid (DNA) encoding the DENV 4 NS2A polypeptide is provided herein as SEQ ID No: 385, as follows:

[SEQ ID No: 385]
GGCCAGGGAACAAGCGAGACATTTTCCATGGGCCTGCTGTGTCTGACCCTGTTCGTGGAAGAGTGCCTGCGGAGAAGA
GTGACCCGGAAGCACATGATCCTGGTGGTGGTCATCACCCTGTGCGCCATCATTCTCGGCGGCCTGACATGGATGGAT
CTGCTGAGAGCCCTGATCATGCTGGGCGATACCATGAGCGGCAGAATCGGCGGACAGATCCACCTGGCCATCATGGCC
GTGTTCAAGATGAGCCCTGGCTACGTGCTGGGCGTGTTCCTGAGAAAGCTGACCAGCAGAGAAACAGCCCTGATGGTC
ATCGGAATGGCCATGACCACCGTGCTGAGCATCCCTCACGACCTGATGGAACTGATCGACGGCATCAGCCTGGGCCTG
ATCCTGCTGAAGATCGTGACCCAGTTCGACAACACCCAAGTGGGCACACTGGCCCTGAGCCTGACCTTCATCAGATCC
ACAATGCCCCTCGTGATGGCCTGGCGGACAATTATGGCCGTGCTGTTCGTCGTGACACTGATCCCTCTGTGCAGAACC
AGCTGCCTGCAGAAACAGAGCCACTGGGTCGAGATCACCGCTCTGATTCTGGGAGCACAGGCCCTGCCTGTGTACCTG
ATGACACTTATGAAGGGCGCCAGCAGACGG

[0773] Hence, preferably the RNA construct is encoded by a DNA sequence substantially as set out in SEQ ID No: 385, or a fragment or variant thereof.

[0774] In an embodiment, the RNA sequence corresponding to the codon optimised DNA sequence of SEQ ID No: 385 is provided herein as SEQ ID No: 386, as follows:

[SEQ ID No: 386]
GGCCAGGGAACAAGCGAGACAUUUUCCAUGGGCCUGCUGUGUCUGACCCUGUUCGUGGAAGAGUGCCUGCGGAGAAGA
GUGACCCGGAAGCACAUGAUCCUGGUGGUGGUCAUCACCCUGUGCGCCAUCAUUCUCGGCGGCCUGACAUGGAUGGAU
CUGCUGAGAGCCCUGAUCAUGCUGGGCGAUACCAUGAGCGGCAGAAUCGGCGGACAGAUCCACCUGGCCAUCAUGGCC
GUGUUCAAGAUGAGCCCUGGCUACGUGCUGGGCGUGUUCCUGAGAAAGCUGACCAGCAGAGAAACAGCCCUGAUGGUC
AUCGGAAUGGCCAUGACCACCGUGCUGAGCAUCCCUCACGACCUGAUGGAACUGAUCGACGGCAUCAGCCUGGGCCUG
AUCCUGCUGAAGAUCGUGACCCAGUUCGACAACACCCAAGUGGGCACACUGGCCCUGAGCCUGACCUUCAUCAGAUCC
ACAAUGCCCCUCGUGAUGGCCUGGCGGACAAUUAUGGCCGUGCUGUUCGUCGUGACACUGAUCCCUCUGUGCAGAACC
AGCUGCCUGCAGAAACAGAGCCACUGGGUCGAGAUCACCGCUCUGAUUCUGGGAGCACAGGCCCUGCCUGUGUACCUG
AUGACACUUAUGAAGGGCGCCAGCAGACGG

[0775] Hence, preferably the RNA construct comprises a sequence substantially as set out in SEQ ID No: 386, or a fragment or variant thereof.

[0776] In one embodiment, the at least one IIP is DENV 1 NS2B (P17763; Genome polyprotein Dengue virus type 1 (strain Nauru/West Pac/1974)), or an orthologue thereof. One embodiment of the polypeptide sequence of DENV 1 NS2B is represented herein as SEQ ID No: 387, as follows:

[SEQ ID No: 387]
SWPLNEGIMAVGIVSILLSSLLKNDVPLAGPLIAGGMLIACYVISGSSADLSLEKAAEVSWEEEAEHSGASHNILVEV
QDDGTMKIKDEERDDTLTILLKATLLAISGVYPMSIPATLFVWYFWQKKKQR

[0777] Therefore, preferably the RNA construct comprises a nucleotide sequence which encodes an amino acid sequence substantially as set out in SEQ ID No: 387, or a variant or fragment thereof.

[0778] In one embodiment, the DENV 1 NS2B polypeptide is encoded by the DNA nucleotide sequence of SEQ ID No: 388, as follows:

[SEQ ID No: 388]
AGCTGGCCTCTCAATGAAGGAATTATGGCTGTTGGAATAGTTAGCATTCTTCTAAGTTCACTTCTCAAGAATGATGTG
CCACTAGCTGGCCCACTAATAGCTGGAGGCATGCTAATAGCATGTTATGTCATATCTGGAAGCTCGGCCGATTTATCA
CTGGAGAAAGCGGCTGAGGTCTCCTGGGAAGAAGAAGCAGAACACTCTGGTGCCTCACACAACATACTAGTGGAGGTC
CAAGATGATGGAACCATGAAGATAAAGGATGAAGAGAGAGATGACACACTCACCATTCTCCTCAAAGCAACTCTGCTA
GCAATCTCAGGGGTATACCCAATGTCAATACCGGCGACCCTCTTTGTGTGGTATTTTTGGCAGAAAAAGAAACAGAGA

[0779] Accordingly, preferably the DENV 1 NS2B polypeptide is encoded by the DNA nucleotide sequence substantially as set out in SEQ ID NO: 388, or a variant or fragment thereof.

[0780] One embodiment of codon optimised nucleic acid (DNA) encoding the DENV 1 NS2B polypeptide is provided herein as SEQ ID No: 389, as follows:

[SEQ ID No: 389]
AGCTGGCCTCTGAACGAGGGAATTATGGCCGTGGGCATCGTGTCCATCCTGCTGTCTAGCCTGCTGAAGAACGACGTG
CCACTGGCCGGACCTCTTATTGCTGGCGGAATGCTGATCGCCTGCTACGTGATCAGCGGCAGCTCTGCCGATCTGAGC
CTGGAAAAAGCCGCCGAGGTGTCCTGGGAAGAAGAGGCCGAACATTCTGGCGCCTCTCACAACATCCTGGTGGAAGTG
CAGGACGACGGCACCATGAAGATCAAGGACGAGGAACGGGACGACACCCTGACCATTCTGCTGAAGGCTACCCTGCTG
GCCATCAGCGGAGTGTACCCTATGAGCATCCCCGCCACTCTGTTCGTGTGGTACTTCTGGCAGAAGAAGAAGCAGCGG

[0781] Hence, preferably the RNA construct is encoded by a DNA sequence substantially as set out in SEQ ID No: 389, or a fragment or variant thereof.

[SEQ ID No: 390]
AGCUGGCCUCUGAACGAGGGAAUUAUGGCCGUGGGCAUCGUGUCCAUCCUGCUGUCUAGCCUGCUGAAGAACGACGUG
CCACUGGCCGGACCUCUUAUUGCUGGCGGAAUGCUGAUCGCCUGCUACGUGAUCAGCGGCAGCUCUGCCGAUCUGAGC
CUGGAAAAAGCCGCCGAGGUGUCCUGGGAAGAAGAGGCCGAACAUUCUGGCGCCUCUCACAACAUCCUGGUGGAAGUG
CAGGACGACGGCACCAUGAAGAUCAAGGACGAGGAACGGGACGACACCCUGACCAUUCUGCUGAAGGCUACCCUGCUG
GCCAUCAGCGGAGUGUACCCUAUGAGCAUCCCCGCCACUCUGUUCGUGUGGUACUUCUGGCAGAAGAAGAAGCAGCGG

[0782] Hence, preferably the RNA construct comprises a sequence substantially as set out in SEQ ID No: 390, or a fragment or variant thereof.

[0783] In one embodiment, the at least one IIP is DENV 2 NS2B (P29990; Genome polyprotein Dengue virus type 2 (strain Thailand/16681/1984)), or an orthologue thereof. One embodiment of the polypeptide sequence of DENV 2 NS2B is represented herein as SEQ ID No: 391, as follows:

[SEQ ID No: 391]
SWPLNEAIMAVGMVSILASSLLKNDIPMTGPLVAGGPLTVCYVLTGRSA
DLELERAADVKWEDQAEISGSSPILSITISEDGSMSIKNEEEEQTLTIL
IRTGLLVISGLFPVSIPITAAAWYLWEVKKQR

[0784] Therefore, preferably the RNA construct comprises a nucleotide sequence which encodes an amino acid sequence substantially as set out in SEQ ID No: 391, or a variant or fragment thereof.

[0785] In one embodiment, the DENV 2 NS2B polypeptide is encoded by the DNA nucleotide sequence of SEQ ID No: 392, as follows:

[SEQ ID No: 392]
AGCTGGCCATTAAATGAGGCTATCATGGCAGTCGGGATGGTGAGCATTTTAGCCAGTTCTCTCCTAAAAAATGATATT
CTGGAGAGAGCAGCCGATGTCAAATGGGAAGACCAGGCAGAGATATCAGGAAGCAGCCCAATCCTGTCAATAACAATA
TCAGAAGATGGTAGCATGTCGATAAAAAATGAAGAGGAAGAACAAACACTGACCATACTCATTAGAACAGGATTGCTG
GTGATCTCAGGACTTTTTCCTGTATCAATACCAATCACGGCAGCAGCATGGTACCTGTGGGAAGTGAAGAAACAACGG

[0786] Accordingly, preferably the DENV 2 NS2B polypeptide is encoded by the DNA nucleotide sequence substantially as set out in SEQ ID NO: 392, or a variant or fragment thereof.

[0787] One embodiment of codon optimised nucleic acid (DNA) encoding the DENV 2 NS2B polypeptide is provided herein as SEQ ID No: 393, as follows:

[SEQ ID No: 393]
AGCTGGCCTCTGAACGAGGCCATTATGGCCGTCGGCATGGTGTCTATCCTGGCCAGCAGCCTGCTGAAGAACGACATC
CCTATGACAGGCCCTCTGGTGGCTGGTGGACCTCTGACAGTGTGTTACGTGCTGACAGGCAGAAGCGCCGACCTGGAA
CTTGAAAGGGCCGCTGATGTGAAGTGGGAAGATCAGGCCGAGATCAGCGGCAGCAGCCCTATCCTGAGCATCACCATC
AGCGAGGACGGCAGCATGAGCATCAAGAACGAGGAAGAGGAACAGACCCTGACCATCCTGATCAGAACCGGCCTGCTG
GTCATCAGCGGACTGTTCCCTGTGTCAATCCCCATCACAGCCGCCGCTTGGTATCTGTGGGAAGTGAAGAAGCAGCGG

[0788] Hence, preferably the RNA construct is encoded by a DNA sequence substantially as set out in SEQ ID No: 393, or a fragment or variant thereof.

[0789] In an embodiment, the RNA sequence corresponding to the codon optimised DNA sequence of SEQ ID No: 393 is provided herein as SEQ ID No: 394, as follows:

[SEQ ID No: 394]
AGCUGGCCUCUGAACGAGGCCAUUAUGGCCGUCGGCAUGGUGUCUAUCCUGGCCAGCAGCCUGCUGAAGAACGACAUC
CCUAUGACAGGCCCUCUGGUGGCUGGUGGACCUCUGACAGUGUGUUACGUGCUGACAGGCAGAAGCGCCGACCUGGAA
CUUGAAAGGGCCGCUGAUGUGAAGUGGGAAGAUCAGGCCGAGAUCAGCGGCAGCAGCCCUAUCCUGAGCAUCACCAUC
AGCGAGGACGGCAGCAUGAGCAUCAAGAACGAGGAAGAGGAACAGACCCUGACCAUCCUGAUCAGAACCGGCCUGCUG
GUCAUCAGCGGACUGUUCCCUGUGUCAAUCCCCAUCACAGCCGCCGCUUGGUAUCUGUGGGAAGUGAAGAAGCAGCGG

[0790] Hence, preferably the RNA construct comprises a sequence substantially as set out in SEQ ID No: 394, or a fragment or variant thereof.

[0791] In one embodiment, the at least one IIP is DENV 4 NS2B (P09866; Genome polyprotein virus type 4 (strain Dominica/814669/1981)), or an orthologue thereof. One embodiment of the polypeptide sequence of DENV 4 NS2B is represented herein as SEQ ID No: 395, as follows:

[SEQ ID No: 395]
SWPLNEGIMAVGLVSLLGSALLKNDVPLAGPMVAGGLLLAAYVMSGSSA
DLSLEKAANVQWDEMADITGSSPIIEVKQDEDGSFSIRDVEETNMITLL
VKLALITVSGLYPLAIPVTMTLWYMWQVKTQR

[0792] Therefore, preferably the RNA construct comprises a nucleotide sequence which encodes an amino acid sequence substantially as set out in SEQ ID No: 395, or a variant or fragment thereof.

[0793] In one embodiment, the DENV 4 NS2B polypeptide is encoded by the DNA nucleotide sequence of SEQ ID No: 396, as follows:

[SEQ ID No: 396]
TCTTGGCCTCTTAACGAGGGCATAATGGCTGTGGGTTTGGTTAGTCTCTTAGGAAGCGCTCTTTTAAAGAATGATGTC
CCTTTAGCTGGCCCAATGGTGGCAGGAGGCTTACTTCTGGCGGCTTACGTGATGAGTGGTAGCTCAGCAGATCTGTCA
CTAGAGAAGGCCGCCAACGTGCAGTGGGATGAAATGGCAGACATAACAGGCTCAAGCCCAATCATAGAAGTGAAGCAG
GATGAAGATGGCTCTTTCTCCATACGGGACGTCGAGGAAACCAATATGATAACCCTTTTGGTGAAACTGGCACTGATA
ACAGTGTCAGGTCTCTACCCCTTGGCAATTCCAGTCACAATGACCTTATGGTACATGTGGCAAGTGAAAACACAAAGA

[0794] Accordingly, preferably the DENV 4 NS2B polypeptide is encoded by the DNA nucleotide sequence substantially as set out in SEQ ID NO: 396, or a variant or fragment thereof.

[0795] One embodiment of codon optimised nucleic acid (DNA) encoding the DENV 4 NS2B polypeptide is provided herein as SEQ ID No: 397, as follows:

[SEQ ID No: 397]
AGCTGGCCTCTGAACGAGGGAATCATGGCCGTTGGCCTGGTGTCTCTGCTGGGATCTGCCCTGCTGAAGAACGATGTG
CCTCTGGCCGGACCTATGGTTGCTGGTGGACTGCTGCTGGCCGCCTATGTGATGTCTGGAAGCAGCGCCGATCTGAGC
CTGGAAAAGGCCGCTAACGTGCAGTGGGACGAGATGGCCGATATCACAGGCAGCAGCCCCATCATCGAAGTGAAGCAG
GATGAGGACGGCAGCTTCAGCATCCGCGACGTGGAAGAGACAAACATGATCACCCTGCTGGTCAAGCTGGCCCTGATC
ACCGTGTCTGGCCTGTATCCTCTGGCTATCCCCGTGACCATGACACTGTGGTACATGTGGCAAGTGAAAACCCAGCGG

[0796] Hence, preferably the RNA construct is encoded by a DNA sequence substantially as set out in SEQ ID No: 397, or a fragment or variant thereof.

[0797] In an embodiment, the RNA sequence corresponding to the codon optimised DNA sequence of SEQ ID No: 397 is provided herein as SEQ ID No: 398, as follows:

[SEQ ID No: 398]
AGCUGGCCUCUGAACGAGGGAAUCAUGGCCGUUGGCCUGGUGUCUCUGCUGGGAUCUGCCCUGCUGAAGAACGAUGUG
CCUCUGGCCGGACCUAUGGUUGCUGGUGGACUGCUGCUGGCCGCCUAUGUGAUGUCUGGAAGCAGCGCCGAUCUGAGC
CUGGAAAAGGCCGCUAACGUGCAGUGGGACGAGAUGGCCGAUAUCACAGGCAGCAGCCCCAUCAUCGAAGUGAAGCAG
GAUGAGGACGGCAGCUUCAGCAUCCGCGACGUGGAAGAGACAAACAUGAUCACCCUGCUGGUCAAGCUGGCCCUGAUC
ACCGUGUCUGGCCUGUAUCCUCUGGCUAUCCCCGUGACCAUGACACUGUGGUACAUGUGGCAAGUGAAAACCCAGCGG

[0798] Hence, preferably the RNA construct comprises a sequence substantially as set out in SEQ ID No: 398, or a fragment or variant thereof.

[0799] In one embodiment, the at least one IIP is WNV NS4A (P06935; Genome polyprotein West Nile virus NS4A), or an orthologue thereof. One embodiment of the polypeptide sequence of WNV NS4A is represented herein as SEQ ID No: 399, as follows:

[SEQ ID No: 399]
SQIGLVEVLGRMPEHFMVKTWEALDTMYVVATAEKGGRAHRMALEELPD
ALQTIVLIALLSVMSLGVFFLLMQRKGIGKIGLGGVILGAATFFCWMAE
VPGTKIAGMLLLSLLLMIVLIPEPEKQR

[0800] Therefore, preferably the RNA construct comprises a nucleotide sequence which encodes an amino acid sequence substantially as set out in SEQ ID No: 399, or a variant or fragment thereof.

[0801] In one embodiment, the WNV NS4A polypeptide is encoded by the DNA nucleotide sequence of SEQ ID No: 400, as follows:

[SEQ ID No: 400]
TCACAAATCGGGCTCGTTGAGGTGCTCGGGAGAATGCCTGAACACTTCATGGTGAAAACTTGGGAGGCATTGGACACG
ATGTATGTGGTGGCGACCGCTGAAAAAGGAGGCCGAGCTCACAGGATGGCTCTTGAGGAGCTACCGGACGCCCTTCAG
ACAATAGTTTTGATTGCACTATTGAGTGTGATGTCCTTAGGTGTGTTTTTTCTACTCATGCAAAGGAAGGGCATTGGT
AAGATTGGCTTGGGAGGAGTAATCTTAGGAGCTGCCACATTCTTCTGCTGGATGGCTGAAGTCCCAGGAACGAAAATA
GCAGGCATGCTCCTGCTTTCCCTGCTGCTCATGATTGTTTTGATTCCGGAGCCGGAAAAGCAGCGC

[0802] Accordingly, preferably the WNV NS4A polypeptide is encoded by the DNA nucleotide sequence substantially as set out in SEQ ID NO: 400, or a variant or fragment thereof.

[0803] One embodiment of codon optimised nucleic acid (DNA) encoding the WNV NS4A polypeptide is provided herein as SEQ ID No: 401, as follows:

[SEQ ID No: 401]
TCTCAGATCGGCCTGGTGGAAGTGCTGGGCAGAATGCCTGAGCACTTCATGGTCAAGACCTGGGAAGCCCTGGACACT
ATGTACGTGGTGGCCACAGCCGAGAAAGGCGGCAGAGCACATAGAATGGCCCTGGAAGAACTGCCCGACGCTCTGCAG
ACAATCGTGCTGATTGCCCTGCTGAGCGTGATGAGCCTGGGCGTGTTCTTCCTGCTGATGCAGAGAAAAGGCATCGGC
AAGATCGGACTCGGCGGCGTTATACTGGGAGCCGCCACCTTCTTTTGCTGGATGGCTGAAGTGCCCGGCACCAAGATT
GCCGGAATGCTGCTGCTGTCCCTGCTGCTGATGATTGTGCTGATCCCCGAGCCTGAGAAGCAGAGA

[0804] Hence, preferably the RNA construct is encoded by a DNA sequence substantially as set out in SEQ ID No: 401, or a fragment or variant thereof.

[0805] In an embodiment, the RNA sequence corresponding to the codon optimised DNA sequence of SEQ ID No: 401 is provided herein as SEQ ID No: 402, as follows:

[SEQ ID No: 402]
UCUCAGAUCGGCCUGGUGGAAGUGCUGGGCAGAAUGCCUGAGCACUUCAUGGUCAAGACCUGGGAAGCCCUGGACACU
AUGUACGUGGUGGCCACAGCCGAGAAAGGCGGCAGAGCACAUAGAAUGGCCCUGGAAGAACUGCCCGACGCUCUGCAG
ACAAUCGUGCUGAUUGCCCUGCUGAGCGUGAUGAGCCUGGGCGUGUUCUUCCUGCUGAUGCAGAGAAAAGGCAUCGGC
AAGAUCGGACUCGGCGGCGUUAUACUGGGAGCCGCCACCUUCUUUUGCUGGAUGGCUGAAGUGCCCGGCACCAAGAUU
GCCGGAAUGCUGCUGCUGUCCCUGCUGCUGAUGAUUGUGCUGAUCCCCGAGCCUGAGAAGCAGAGA

[0806] Hence, preferably the RNA construct comprises a sequence substantially as set out in SEQ ID No: 402, or a fragment or variant thereof.

[0807] In one embodiment, the at least one IIP is WNV NS4B (P06935; Genome polyprotein West Nile virus NS4A), or an orthologue thereof. One embodiment of the polypeptide sequence of WNV NS4B is represented herein as SEQ ID No: 403, as follows:

[SEQ ID No: 403]
NEMGWLDKTKNDIGSLLGHRPEARETTLGVESFLLDLRPATAWSLYAVTTAVLTPLLKHLITSDYINTSLTSINVQAS
ALFTLARGFPFVDVGVSALLLAVGCWGQVTLTVTVTAAALLFCHYAYMVPGWQAEAMRSAQRRTAAGIMKNVVVDGIV
ATDVPELERTTPVMQKKVGQIILILVSMAAVVVNPSVRTVREAGILTTAAAVTLWENGASSVWNATTAIGLCHIMRGG
WLSCLSIMWTLIKNMEKPGLKR

[0808] Therefore, preferably the RNA construct comprises a nucleotide sequence which encodes an amino acid sequence substantially as set out in SEQ ID No: 403, or a variant or fragment thereof.

[0809] In one embodiment, the WNV NS4B polypeptide is encoded by the DNA nucleotide sequence of SEQ ID No: 404, as follows:

[SEQ ID No: 404]
AATGAAATGGGCTGGCTGGACAAGACCAAGAATGACATTGGCAGCCTGTTGGGGCACAGGCCAGAAGCTAGAGAGACG
ACCCTGGGAGTTGAGAGCTTCTTACTTGATCTGCGGCCGGCCACGGCATGGTCGCTCTATGCCGTAACGACAGCCGTT
CTCACCCCTTTGCTGAAGCATCTAATCACGTCAGACTACATCAACACTTCGTTGACCTCAATAAACGTCCAAGCCAGC
GCGTTGTTCACTTTGGCCAGAGGCTTCCCTTTTGTGGACGTTGGTGTGTCAGCTCTCTTGCTGGCGGTCGGGTGCTGG
GGTCAGGTGACTCTGACTGTGACTGTGACTGCAGCTGCTCTGCTCTTTTGCCACTATGCTTACATGGTGCCAGGCTGG
CAAGCGGAAGCCATGCGATCTGCCCAGCGGCGGACAGCTGCTGGCATCATGAAAAATGTAGTGGTGGATGGGATCGTG
GCCACTGATGTACCTGAACTTGAACGAACAACTCCAGTCATGCAGAAAAAAGTTGGACAGATCATATTGATCTTGGTA
TCAATGGCCGCGGTGGTCGTCAATCCATCAGTGAGAACCGTCAGAGAGGCCGGAATTCTGACTACAGCAGCAGCAGTC
ACCCTATGGGAGAATGGTGCTAGTTCAGTGTGGAATGCAACGACAGCTATTGGCCTTTGTCACATCATGCGAGGAGGA
TGGCTCTCGTGTCTCTCCATCATGTGGACTCTCATCAAAAACATGGAGAAACCAGGCCTCAAGAGG

[0810] Accordingly, preferably the WNV NS4B polypeptide is encoded by the DNA nucleotide sequence substantially as set out in SEQ ID NO: 404, or a variant or fragment thereof.

[0811] One embodiment of codon optimised nucleic acid (DNA) encoding the WNV NS4B polypeptide is provided herein as SEQ ID No: 405, as follows:

[SEQ ID No: 405]
AACGAGATGGGCTGGCTGGACAAGACCAAGAACGACATCGGAAGCCTGCTGGGCCACAGACCTGAGGCCAGAGAAACA
ACCCTGGGCGTCGAGAGCTTCCTGCTGGATCTTAGACCTGCCACCGCTTGGAGCCTGTACGCCGTTACAACAGCCGTG
CTGACCCCTCTGCTGAAGCACCTGATCACCAGCGACTACATCAACACCAGCCTGACCAGCATCAACGTGCAGGCCAGC
GCTCTGTTTACCCTGGCCAGAGGCTTCCCCTTTGTGGACGTGGGAGTTTCTGCTCTGCTGCTGGCCGTTGGCTGTTGG
GGACAAGTGACCCTGACCGTGACAGTGACTGCTGCCGCTCTGCTGTTCTGCCACTACGCCTATATGGTGCCTGGATGG
CAGGCCGAGGCCATGAGATCTGCCCAGAGAAGAACAGCCGCCGGAATCATGAAGAACGTGGTGGTGGATGGCATCGTG
GCCACCGACGTTCCAGAGCTGGAAAGAACCACACCTGTGATGCAGAAGAAAGTCGGCCAGATCATCCTGATCCTGGTG
TCCATGGCCGCCGTGGTGGTCAATCCTAGCGTGCGGACAGTTAGAGAGGCCGGCATCCTGACAACAGCTGCCGCTGTT
ACCCTGTGGGAGAATGGCGCTAGCAGCGTGTGGAATGCCACCACAGCCATCGGCCTGTGCCACATCATGAGAGGCGGC
TGGCTGAGCTGCCTGAGCATCATGTGGACCCTGATCAAGAACATGGAAAAGCCCGGCCTGAAGCGG

[0812] Hence, preferably the RNA construct is encoded by a DNA sequence substantially as set out in SEQ ID No: 405, or a fragment or variant thereof.

[0813] In an embodiment, the RNA sequence corresponding to the codon optimised DNA sequence of SEQ ID No: 405 is provided herein as SEQ ID No: 406, as follows:

[SEQ ID No: 406]
AACGAGAUGGGCUGGCUGGACAAGACCAAGAACGACAUCGGAAGCCUGCUGGGCCACAGACCUGAGGCCAGAGAAACA
ACCCUGGGCGUCGAGAGCUUCCUGCUGGAUCUUAGACCUGCCACCGCUUGGAGCCUGUACGCCGUUACAACAGCCGUG
CUGACCCCUCUGCUGAAGCACCUGAUCACCAGCGACUACAUCAACACCAGCCUGACCAGCAUCAACGUGCAGGCCAGC
GCUCUGUUUACCCUGGCCAGAGGCUUCCCCUUUGUGGACGUGGGAGUUUCUGCUCUGCUGCUGGCCGUUGGCUGUUGG
GGACAAGUGACCCUGACCGUGACAGUGACUGCUGCCGCUCUGCUGUUCUGCCACUACGCCUAUAUGGUGCCUGGAUGG
CAGGCCGAGGCCAUGAGAUCUGCCCAGAGAAGAACAGCCGCCGGAAUCAUGAAGAACGUGGUGGUGGAUGGCAUCGUG
GCCACCGACGUUCCAGAGCUGGAAAGAACCACACCUGUGAUGCAGAAGAAAGUCGGCCAGAUCAUCCUGAUCCUGGUG
UCCAUGGCCGCCGUGGUGGUCAAUCCUAGCGUGCGGACAGUUAGAGAGGCCGGCAUCCUGACAACAGCUGCCGCUGUU
ACCCUGUGGGAGAAUGGCGCUAGCAGCGUGUGGAAUGCCACCACAGCCAUCGGCCUGUGCCACAUCAUGAGAGGCGGC
UGGCUGAGCUGCCUGAGCAUCAUGUGGACCCUGAUCAAGAACAUGGAAAAGCCCGGCCUGAAGCGG

[0814] Hence, preferably the RNA construct comprises a sequence substantially as set out in SEQ ID No: 406, or a fragment or variant thereof.

[0815] In one embodiment, the at least one IIP is Rabies Virus PP (P69479; Phosphoprotein Rabies virus (strain ERA)), or an orthologue thereof. One embodiment of the polypeptide sequence of Rabies Virus PP is represented herein as SEQ ID No: 407, as follows:

[SEQ ID No: 407]
MSKIFVNPSAIRAGLADLEMAEETVDLINRNIEDNQAHLQGEPIEVDNLPEDMGRLHLDDGKSPNPGEMAKVGEGKYR
EDFQMDEGEDPSFLFQSYLENVGVQIVRQMRSGERFLKIWSQTVEEIISYVAVNFPNPPGKSSEDKSTQTTGRELKKE
TTPTPSQRESQSSKARMAAQTASGPPALEWSATNEKDDLSVEAEIAHQIAESFSKKYKFPSRSSGILLYNFEQLKMNL
DDIVKEAKNVPGVTRLAHDGSKLPLRCVLGWVALANSKKFQLLVESDKLSKIMQDDLNRYTSC

[0816] Therefore, preferably the RNA construct comprises a nucleotide sequence which encodes an amino acid sequence substantially as set out in SEQ ID No: 407, or a variant or fragment thereof.

[0817] In one embodiment, the Rabies Virus PP polypeptide is encoded by the DNA nucleotide sequence of SEQ ID No: 408, as follows:

[SEQ ID No: 408]
ATGAGCAAGATCTTTGTCAATCCTAGTGCTATTAGAGCCGGTCTGGCCGATCTTGAGATGGCTGAAGAAACTGTTGAT
CTGATCAATAGAAATATCGAAGACAATCAGGCTCATCTCCAAGGGGAACCCATAGAAGTGGACAATCTCCCTGAGGAT
ATGGGGCGACTTCACCTGGATGATGGAAAATCGCCCAACCCTGGTGAGATGGCCAAGGTGGGAGAAGGCAAGTATCGA
GAGGACTTTCAGATGGATGAAGGAGAGGATCCTAGCTTCCTGTTCCAGTCATACCTGGAAAATGTTGGAGTCCAAATA
GTCAGACAAATGAGGTCAGGAGAGAGATTTCTCAAGATATGGTCACAGACCGTAGAAGAGATTATATCCTATGTCGCG
GTCAACTTTCCCAACCCTCCAGGAAAGTCTTCAGAGGATAAATCAACCCAGACTACTGGCCGAGAGCTCAAGAAGGAG
ACAACACCCACTCCTTCTCAGAGAGAAAGCCAATCATCGAAAGCCAGGATGGCGGCTCAAACTGCTTCTGGCCCTCCA
GCCCTTGAATGGTCGGCCACCAATGAAAAGGATGATCTATCAGTGGAGGCTGAGATCGCTCACCAGATTGCAGAAAGT
TTCTCCAAAAAATATAAGTTTCCCTCTCGATCCTCAGGGATACTCTTGTATAATTTTGAGCAATTGAAAATGAACCTT
GATGATATAGTTAAAGAGGCAAAAAATGTACCAGGTGTGACCCGTTTAGCCCATGACGGGTCCAAACTCCCCCTAAGA
TGTGTACTGGGATGGGTCGCTTTGGCCAACTCTAAGAAATTCCAGTTGTTAGTCGAATCCGACAAGCTGAGTAAAATC
ATGCAAGATGACTTGAATCGCTATACATCTTGC

[0818] Accordingly, preferably the Rabies Virus PP polypeptide is encoded by the DNA nucleotide sequence substantially as set out in SEQ ID NO: 408, or a variant or fragment thereof.

[0819] One embodiment of codon optimised nucleic acid (DNA) encoding the Rabies Virus PP polypeptide is provided herein as SEQ ID No: 409, as follows:

[SEQ ID No: 409]
ATGAGCAAGATCTTCGTGAACCCCAGCGCCATCAGAGCCGGACTGGCTGATCTGGAAATGGCCGAGGAAACCGTGGAC
CTGATCAACCGGAACATCGAGGACAATCAGGCCCATCTGCAGGGCGAGCCTATCGAGGTTGACAACCTGCCTGAGGAC
ATGGGCAGACTGCACCTGGATGATGGCAAGAGCCCTAATCCTGGCGAGATGGCCAAAGTCGGCGAGGGCAAGTACCGC
GAGGACTTCCAAATGGACGAGGGCGAAGATCCCAGCTTCCTGTTCCAGTCCTACCTGGAAAACGTGGGCGTGCAGATC
GTGCGGCAGATGAGAAGCGGCGAGCGGTTCCTGAAGATCTGGTCCCAGACCGTGGAAGAGATCATCAGCTACGTGGCC
GTGAACTTCCCCAATCCTCCAGGCAAGAGCAGCGAGGACAAGAGCACACAGACCACCGGCAGAGAGCTGAAGAAAGAG
ACAACCCCTACACCTAGCCAGAGAGAGAGCCAGAGCAGCAAGGCCAGAATGGCCGCTCAGACAGCTTCTGGACCTCCT
GCACTTGAGTGGAGCGCCACCAACGAGAAGGACGACCTGTCTGTGGAAGCCGAGATCGCCCACCAGATCGCCGAGAGC
TTCAGCAAGAAGTACAAGTTCCCCAGCAGAAGCAGCGGCATCCTGCTGTACAACTTCGAGCAGCTGAAGATGAACCTG
GACGACATCGTGAAAGAGGCCAAGAACGTCCCCGGCGTGACAAGACTGGCCCACGATGGATCTAAGCTGCCCCTGAGA
TGTGTGCTCGGATGGGTTGCCCTGGCCAACAGCAAGAAATTCCAGCTGCTGGTGGAAAGCGACAAGCTGTCCAAGATC
ATGCAGGACGATCTGAACCGGTACACCAGCTGC

[0820] Hence, preferably the RNA construct is encoded by a DNA sequence substantially as set out in SEQ ID No: 409, or a fragment or variant thereof.

[0821] In an embodiment, the RNA sequence corresponding to the codon optimised DNA sequence of SEQ ID No: 409 is provided herein as SEQ ID No: 410, as follows:

[SEQ ID No: 410]
AUGAGCAAGAUCUUCGUGAACCCCAGCGCCAUCAGAGCCGGACUGGCUGAUCUGGAAAUGGCCGAGGAAACCGUGGAC
CUGAUCAACCGGAACAUCGAGGACAAUCAGGCCCAUCUGCAGGGCGAGCCUAUCGAGGUUGACAACCUGCCUGAGGAC
AUGGGCAGACUGCACCUGGAUGAUGGCAAGAGCCCUAAUCCUGGCGAGAUGGCCAAAGUCGGCGAGGGCAAGUACCGC
GAGGACUUCCAAAUGGACGAGGGCGAAGAUCCCAGCUUCCUGUUCCAGUCCUACCUGGAAAACGUGGGCGUGCAGAUC
GUGCGGCAGAUGAGAAGCGGCGAGCGGUUCCUGAAGAUCUGGUCCCAGACCGUGGAAGAGAUCAUCAGCUACGUGGCC
GUGAACUUCCCCAAUCCUCCAGGCAAGAGCAGCGAGGACAAGAGCACACAGACCACCGGCAGAGAGCUGAAGAAAGAG
ACAACCCCUACACCUAGCCAGAGAGAGAGCCAGAGCAGCAAGGCCAGAAUGGCCGCUCAGACAGCUUCUGGACCUCCU
GCACUUGAGUGGAGCGCCACCAACGAGAAGGACGACCUGUCUGUGGAAGCCGAGAUCGCCCACCAGAUCGCCGAGAGC
UUCAGCAAGAAGUACAAGUUCCCCAGCAGAAGCAGCGGCAUCCUGCUGUACAACUUCGAGCAGCUGAAGAUGAACCUG
GACGACAUCGUGAAAGAGGCCAAGAACGUCCCCGGCGUGACAAGACUGGCCCACGAUGGAUCUAAGCUGCCCCUGAGA
UGUGUGCUCGGAUGGGUUGCCCUGGCCAACAGCAAGAAAUUCCAGCUGCUGGUGGAAAGCGACAAGCUGUCCAAGAUC
AUGCAGGACGAUCUGAACCGGUACACCAGCUGC

[0822] Hence, preferably the RNA construct comprises a sequence substantially as set out in SEQ ID No: 410, or a fragment or variant thereof.

[0823] In one embodiment, the at least one IIP is PEDV N protein (Q07499; Nucleoprotein Porcine epidemic diarrhea virus (strain CV777)), or an orthologue thereof. One embodiment of the polypeptide sequence of PEDV N protein is represented herein as SEQ ID No: 411, as follows:

[SEQ ID No: 411]
MASVSFQDRGRKRVPLSLYAPLRVTNDKPLSKVLANNAVPTNKGNKDQQIGYWNEQIRWRMRRGERIEQPSNWHFYYL
GTGPHGDLRYRTRTEGVFWVAKEGAKTEPTNLGVRKASEKPIIPKFSQQLPSVVEIVEPNTPPASRANSRSRSRGNGN
NRSRSPSNNRGNNQSRGNSQNRGNNQGRGASQNRGGNNNNNNKSRNQSNNRNQSNDRGGVTSRDDLVAAVKDALKSLG
IGENPDRHKQQQKPKQEKSDNSGKNTPKKNKSRATSKERDLKDIPEWRRIPKGENSVAACFGPRGGFKNFGDAEFVEK
GVDASGYAQIASLAPNVAALLFGGNVAVRELADSYEITYNYKMTVPKSDPNVELLVSQVDAFKTGNAKLQRKKEKKNK
RETTLQQHEEAIYDDVGAPSDVTHANLEWDTAVDGGDTAVEIINEIFDTGN

[0824] Therefore, preferably the RNA construct comprises a nucleotide sequence which encodes an amino acid sequence substantially as set out in SEQ ID No: 411, or a variant or fragment thereof.

[0825] In one embodiment, the PEDV N polypeptide is encoded by the DNA nucleotide sequence of SEQ ID No: 412, as follows:

[SEQ ID No: 412]
ATGGCTTCTGTCAGCTTTCAGGATCGTGGCCGCAAACGGGTGCCATTATCTCTCTATGCCCCTCTTAGGGTTACTAAT
GACAAGCCCCTTTCTAAGGTACTTGCAAACAACGCTGTACCCACTAACAAGGGGAATAAGGACCAGCAAATTGGGTAC
TGGAATGAGCAAATTCGCTGGCGCATGCGCCGTGGTGAGCGAATTGAACAACCTTCCAATTGGCATTTCTACTACCTC
GGAACAGGACCTCACGGCGACCTCCGTTATAGGACTCGTACTGAGGGTGTTTTCTGGGTTGCTAAAGAAGGCGCAAAG
ACTGAACCCACTAATTTGGGTGTCAGAAAGGCGTCTGAAAAGCCAATCATTCCAAAATTCTCTCAACAGCTCCCCAGT
GTAGTTGAGATTGTTGAACCTAACACACCTCCTGCTTCACGTGCAAATTCGCGTAGCAGGAGTCGTGGCAATGGCAAC
AATAGGTCTAGATCTCCAAGTAACAACAGAGGCAATAACCAGTCCCGTGGTAATTCACAGAATCGTGGAAATAACCAG
GGTCGTGGAGCTTCTCAGAACAGAGGAGGCAATAATAATAACAATAACAAGTCTCGTAACCAGTCCAATAACAGGAAC
CAGTCAAATGACCGTGGTGGTGTAACATCACGCGATGATCTGGTGGCTGCTGTCAAGGATGCACTTAAATCTTTGGGT
ATTGGAGAAAATCCTGACAGGCATAAGCAACAGCAGAAGCCTAAGCAGGAAAAGTCTGACAACAGCGGCAAAAATACA
CCTAAGAAGAACAAATCCAGGGCCACTTCGAAGGAACGTGACCTCAAAGACATCCCAGAGTGGAGGAGAATTCCCAAG
GGCGAAAATAGCGTAGCAGCTTGCTTCGGACCCAGAGGGGGCTTCAAAAACTTTGGAGATGCGGAATTTGTCGAAAAA
GGTGTTGATGCGTCAGGCTATGCTCAGATCGCCAGTTTAGCACCAAATGTTGCAGCATTGCTCTTTGGTGGTAATGTG
GCTGTTCGTGAGCTAGCGGACTCTTACGAGATTACATACAACTATAAAATGACTGTGCCAAAGTCAGATCCAAATGTT
GAGCTTCTTGTTTCACAGGTGGATGCATTTAAAACTGGGAATGCAAAACTCCAGAGAAAGAAGGAAAAGAAGAACAAG
CGTGAAACCACGCTGCAGCAGCATGAAGAGGCCATCTACGATGATGTGGGTGCGCCATCTGATGTGACCCATGCCAAT
CTGGAATGGGACACAGCTGTTGATGGTGGTGATACGGCCGTTGAAATTATCAACGAGATCTTCGATACAGGAAAT

[0826] Accordingly, preferably the PEDV N polypeptide is encoded by the DNA nucleotide sequence substantially as set out in SEQ ID NO: 412, or a variant or fragment thereof.

[0827] One embodiment of codon optimised nucleic acid (DNA) encoding the PEDV N polypeptide is provided herein as SEQ ID No: 413, as follows:

[SEQ ID No: 413]
ATGGCCAGCGTCAGCTTTCAGGACCGGGGCAGAAAAAGAGTGCCCCTGTCTCTGTACGCCCCTCTGAGAGTGACCAAC
GACAAGCCCCTGAGCAAGGTGCTGGCCAACAATGCCGTGCCTACCAACAAGGGCAACAAGGACCAGCAGATCGGCTAC
TGGAACGAGCAGATCCGGTGGCGGATGAGAAGAGGCGAGAGAATCGAGCAGCCCAGCAACTGGCACTTCTACTACCTC
GGCACAGGCCCTCACGGCGACCTGAGATACAGAACCAGAACCGAGGGCGTGTTCTGGGTCGCCAAAGAGGGCGCCAAG
ACCGAGCCTACAAATCTCGGCGTCAGAAAGGCCAGCGAGAAGCCTATCATCCCCAAGTTCAGCCAGCAGCTGCCCAGC
GTGGTGGAAATCGTGGAACCCAATACTCCTCCTGCCAGCCGGGCCAACAGCAGAAGCAGATCTAGAGGCAACGGCAAC
AATCGGAGCAGAAGCCCCAGCAACAACCGGGGCAACAACCAGTCCAGAGGCAACAGCCAGAACCGCGGAAACAATCAA
GGCAGAGGCGCTAGCCAGAACAGAGGCGGCAACAACAACAATAACAACAAGAGCCGGAACCAGTCTAACAACCGCAAC
CAGAGCAACGATAGAGGCGGCGTGACCAGCAGGGATGATCTGGTGGCTGCCGTGAAGGATGCCCTGAAGTCTCTCGGC
ATCGGCGAGAACCCCGACAGACACAAGCAGCAGCAGAAACCCAAGCAAGAGAAGTCCGACAACAGCGGCAAGAACACC
CCTAAGAAGAACAAGAGCAGGGCCACCAGCAAAGAGCGGGACCTGAAGGATATTCCCGAGTGGCGGAGAATCCCCAAG
GGCGAGAATTCTGTGGCCGCCTGCTTTGGACCAAGAGGCGGCTTCAAGAATTTCGGCGACGCCGAGTTCGTGGAAAAA
GGCGTGGACGCCTCTGGCTATGCCCAGATTGCATCTCTGGCCCCTAATGTGGCTGCCCTGCTGTTTGGCGGAAACGTG
GCCGTTAGAGAGCTGGCCGATAGCTACGAGATCACCTACAACTACAAGATGACCGTGCCTAAGAGCGACCCCAACGTG
GAACTGCTGGTGTCTCAGGTGGACGCATTCAAGACCGGCAACGCCAAGCTGCAGCGCAAGAAAGAGAAGAAAAACAAG
CGCGAGACAACCCTGCAGCAGCACGAGGAAGCTATCTACGACGACGTGGGAGCCCCTTCCGATGTGACACACGCCAAC
CTGGAATGGGACACAGCAGTGGATGGCGGCGATACCGCCGTGGAAATCATCAACGAGATCTTCGACACCGGCAAC

[0828] Hence, preferably the RNA construct is encoded by a DNA sequence substantially as set out in SEQ ID No: 413, or a fragment or variant thereof.

[0829] In an embodiment, the RNA sequence corresponding to the codon optimised DNA sequence of SEQ ID No: 413 is provided herein as SEQ ID No: 414, as follows:

[SEQ ID No: 414]
AUGGCCAGCGUCAGCUUUCAGGACCGGGGCAGAAAAAGAGUGCCCCUGUCUCUGUACGCCCCUCUGAGAGUGACCAAC
GACAAGCCCCUGAGCAAGGUGCUGGCCAACAAUGCCGUGCCUACCAACAAGGGCAACAAGGACCAGCAGAUCGGCUAC
UGGAACGAGCAGAUCCGGUGGCGGAUGAGAAGAGGCGAGAGAAUCGAGCAGCCCAGCAACUGGCACUUCUACUACCUC
GGCACAGGCCCUCACGGCGACCUGAGAUACAGAACCAGAACCGAGGGCGUGUUCUGGGUCGCCAAAGAGGGCGCCAAG
ACCGAGCCUACAAAUCUCGGCGUCAGAAAGGCCAGCGAGAAGCCUAUCAUCCCCAAGUUCAGCCAGCAGCUGCCCAGC
GUGGUGGAAAUCGUGGAACCCAAUACUCCUCCUGCCAGCCGGGCCAACAGCAGAAGCAGAUCUAGAGGCAACGGCAAC
AAUCGGAGCAGAAGCCCCAGCAACAACCGGGGCAACAACCAGUCCAGAGGCAACAGCCAGAACCGCGGAAACAAUCAA
GGCAGAGGCGCUAGCCAGAACAGAGGCGGCAACAACAACAAUAACAACAAGAGCCGGAACCAGUCUAACAACCGCAAC
CAGAGCAACGAUAGAGGCGGCGUGACCAGCAGGGAUGAUCUGGUGGCUGCCGUGAAGGAUGCCCUGAAGUCUCUCGGC
AUCGGCGAGAACCCCGACAGACACAAGCAGCAGCAGAAACCCAAGCAAGAGAAGUCCGACAACAGCGGCAAGAACACC
CCUAAGAAGAACAAGAGCAGGGCCACCAGCAAAGAGCGGGACCUGAAGGAUAUUCCCGAGUGGCGGAGAAUCCCCAAG
GGCGAGAAUUCUGUGGCCGCCUGCUUUGGACCAAGAGGCGGCUUCAAGAAUUUCGGCGACGCCGAGUUCGUGGAAAAA
GGCGUGGACGCCUCUGGCUAUGCCCAGAUUGCAUCUCUGGCCCCUAAUGUGGCUGCCCUGCUGUUUGGCGGAAACGUG
GCCGUUAGAGAGCUGGCCGAUAGCUACGAGAUCACCUACAACUACAAGAUGACCGUGCCUAAGAGCGACCCCAACGUG
GAACUGCUGGUGUCUCAGGUGGACGCAUUCAAGACCGGCAACGCCAAGCUGCAGCGCAAGAAAGAGAAGAAAAACAAG
CGCGAGACAACCCUGCAGCAGCACGAGGAAGCUAUCUACGACGACGUGGGAGCCCCUUCCGAUGUGACACACGCCAAC
CUGGAAUGGGACACAGCAGUGGAUGGCGGCGAUACCGCCGUGGAAAUCAUCAACGAGAUCUUCGACACCGGCAAC

[0830] Hence, preferably the RNA construct comprises a sequence substantially as set out in SEQ ID No: 414, or a fragment or variant thereof.

[0831] In one embodiment, the at least one IIP is HSV1 ICP27 (P10238; ICP27 mRNA export factor Human herpesvirus 1 (strain 17)), or an orthologue thereof. One embodiment of the polypeptide sequence of HSV1 ICP27 is represented herein as SEQ ID No: 415, as follows:

[SEQ ID No: 415]
MATDIDMLIDLGLDLSDSDLDEDPPEPAESRRDDLESDSSGECSSSDEDMEDPHGEDGPEPILDAARPAVRPSRPEDP
GVPSTQTPRPTERQGPNDPQPAPHSVWSRLGARRPSCSPEQHGGKVARLQPPPTKAQPARGGRRGRRRGRGRGGPGAA
DGLSDPRRRAPRTNRNPGGPRPGAGWTDGPGAPHGEAWRGSEQPDPPGGQRTRGVRQAPPPLMTLAIAPPPADPRAPA
PERKAPAADTIDATTRLVLRSISERAAVDRISESFGRSAQVMHDPFGGQPFPAANSPWAPVLAGQGGPFDAETRRVSW
ETLVAHGPSLYRTFAGNPRAASTAKAMRDCVLRQENFIEALASADETLAWCKMCIHHNLPLRPQDPIIGTTAAVLDNL
ATRLRPFLQCYLKARGLCGLDELCSRRRLADIKDIASFVFVILARLANRVERGVAEIDYATLGVGVGEKMHFYLPGAC
MAGLIEILDTHRQECSSRVCELTASHIVAPPYVHGKYFYCNSLF

[0832] Therefore, preferably the RNA construct comprises a nucleotide sequence which encodes an amino acid sequence substantially as set out in SEQ ID No: 415, or a variant or fragment thereof.

[0833] In one embodiment, the HSV1 ICP27 polypeptide is encoded by the DNA nucleotide sequence of SEQ ID No: 416, as follows:

[SEQ ID No: 416]
ATGGCGACTGACATTGATATGCTAATTGACCTCGGCCTGGACCTCTCCGACAGCGATCTGGACGAGGACCCCCCCGAG
CCGGCGGAGAGCCGCCGCGACGACCTGGAATCGGACAGCAGCGGGGAGTGTTCCTCGTCGGACGAGGACATGGAAGAC
CCCCACGGAGAGGACGGACCGGAGCCGATACTCGACGCCGCTCGCCCGGCGGTCCGCCCGTCTCGTCCAGAAGACCCC
GGCGTACCCAGCACCCAGACGCCTCGTCCGACGGAGCGGCAGGGCCCCAACGATCCTCAACCAGCGCCCCACAGTGTG
TGGTCGCGCCTCGGGGCCCGGCGACCGTCTTGCTCCCCCGAGCAGCACGGGGGCAAGGTGGCCCGCCTCCAACCCCCA
CCGACCAAAGCCCAGCCTGCCCGCGGCGGACGCCGTGGGCGTCGCAGGGGTCGGGGTCGCGGTGGTCCCGGGGCTGCC
GATGGTTTGTCGGACCCCCGCCGGCGTGCCCCCAGAACCAATCGCAACCCTGGGGGACCCCGCCCCGGGGCGGGGTGG
ACGGACGGCCCCGGCGCCCCCCATGGCGAGGCGTGGCGCGGCAGTGAGCAGCCCGACCCACCCGGAGGCCAGCGGACA
CGGGGCGTGCGCCAAGCACCCCCCCCGCTAATGACGCTGGCGATTGCCCCCCCGCCCGCGGACCCCCGCGCCCCGGCC
CCGGAGCGAAAGGCGCCCGCCGCCGACACCATCGACGCCACCACGCGGTTGGTCCTGCGCTCCATCTCCGAGCGCGCG
GCGGTCGACCGCATCAGCGAGAGCTTTGGCCGCAGCGCACAGGTCATGCACGACCCCTTTGGGGGGCAGCCGTTTCCC
GCCGCGAATAGCCCCTGGGCCCCGGTGCTGGCGGGCCAAGGAGGGCCCTTTGACGCCGAGACCAGACGGGTCTCCTGG
GAAACCTTGGTCGCCCACGGCCCGAGCCTCTATCGCACTTTTGCCGGCAATCCTCGGGCCGCATCGACCGCCAAGGCC
ATGCGCGACTGCGTGCTGCGCCAAGAAAATTTCATCGAGGCGCTGGCCTCCGCCGACGAGACGCTGGCGTGGTGCAAG
ATGTGCATCCACCACAACCTGCCGCTGCGCCCCCAGGACCCCATTATCGGGACGACCGCGGCTGTGCTGGATAACCTC
GCCACGCGCCTGCGGCCCTTTCTCCAGTGCTACCTGAAGGCGCGAGGCCTGTGCGGCCTGGACGAACTGTGTTCGCGG
CGGCGTCTGGCGGACATTAAGGACATTGCATCCTTCGTGTTTGTCATTCTGGCCAGGCTCGCCAACCGCGTCGAGCGT
GGCGTCGCGGAGATCGACTACGCGACCCTTGGTGTCGGGGTCGGAGAGAAGATGCATTTCTACCTCCCCGGGGCCTGC
ATGGCGGGCCTGATCGAAATCCTAGACACGCACCGCCAGGAGTGTTCGAGTCGTGTCTGCGAGTTGACGGCCAGTCAC
ATCGTCGCCCCCCCGTACGTGCACGGCAAATATTTTTATTGCAACTCCCTGTTT

[0834] Accordingly, preferably the HSV1 ICP27 polypeptide is encoded by the DNA nucleotide sequence substantially as set out in SEQ ID NO: 416, or a variant or fragment thereof.

[0835] One embodiment of codon optimised nucleic acid (DNA) encoding the HSV1 ICP27 polypeptide is provided herein as SEQ ID No: 417, as follows:

[SEQ ID No: 417]
ATGGCCACCGACATCGACATGCTGATCGACCTGGGCCTCGACCTGAGCGACTCTGACCTGGATGAAGATCCTCCTGAG
CCTGCCGAGAGCAGAAGGGACGATCTGGAAAGCGATAGCAGCGGCGAGTGTAGCAGCAGCGACGAGGACATGGAAGAT
CCCCACGGCGAGGATGGACCTGAGCCTATTCTGGATGCCGCCAGACCTGCCGTCAGACCTTCTAGACCTGAAGATCCA
GGCGTGCCCAGCACACAGACCCCTAGACCTACAGAGAGACAGGGCCCCAACGATCCTCAGCCTGCTCCTCATAGCGTG
TGGTCTAGACTGGGAGCCAGAAGGCCTAGCTGTAGCCCTGAACAGCACGGCGGAAAAGTGGCCAGACTGCAGCCTCCT
CCAACAAAGGCTCAACCTGCTAGAGGCGGCAGACGGGGCAGAAGAAGAGGTAGAGGAAGAGGTGGACCTGGCGCCGCT
GATGGACTGTCTGATCCTAGAAGAAGGGCCCCTCGGACCAACAGAAATCCTGGCGGACCTAGACCAGGCGCCGGATGG
ACAGATGGACCAGGTGCTCCACATGGCGAGGCTTGGAGAGGATCTGAGCAGCCTGATCCTCCAGGCGGCCAAAGAACA
AGAGGCGTTAGACAGGCTCCTCCTCCTCTGATGACCCTGGCTATTGCTCCTCCACCAGCCGATCCTAGAGCACCCGCT
CCAGAAAGAAAAGCCCCTGCCGCCGATACCATCGACGCCACAACAAGACTGGTGCTGCGGAGCATCTCTGAGAGGGCC
GCTGTGGATAGAATCAGCGAGAGCTTTGGGAGAAGCGCCCAAGTGATGCACGACCCTTTTGGCGGCCAGCCTTTTCCT
GCCGCCAATTCTCCTTGGGCTCCTGTGCTTGCTGGACAAGGCGGCCCTTTTGACGCCGAGACAAGAAGAGTGTCCTGG
GAGACACTGGTGGCCCACGGACCTAGCCTGTACAGAACATTCGCCGGCAATCCAAGAGCCGCCAGCACAGCCAAAGCC
ATGAGAGACTGCGTGCTGAGACAAGAGAACTTCATCGAGGCCCTGGCCAGCGCCGATGAGACACTTGCTTGGTGCAAG
ATGTGCATCCACCACAACCTGCCTCTGAGGCCACAGGACCCTATCATCGGAACAACAGCTGCCGTGCTGGATAACCTG
GCTACCAGACTGAGGCCCTTCCTGCAGTGCTACCTGAAGGCCAGAGGACTGTGTGGCCTGGATGAGCTGTGCTCCAGA
AGAAGGCTGGCTGACATCAAGGATATCGCCAGCTTCGTGTTCGTGATTCTGGCCCGGCTGGCCAACAGAGTGGAAAGA
GGCGTGGCCGAGATCGACTATGCCACACTCGGAGTTGGCGTGGGCGAGAAGATGCACTTTTATCTGCCTGGCGCCTGC
ATGGCCGGCCTGATCGAAATTCTGGACACCCACAGACAAGAGTGCAGCTCCAGAGTGTGCGAGCTGACAGCCTCTCAC
ATTGTGGCCCCTCCATACGTGCACGGCAAGTACTTCTACTGCAACAGCCTGTTC

[0836] Hence, preferably the RNA construct is encoded by a DNA sequence substantially as set out in SEQ ID No: 417, or a fragment or variant thereof.

[0837] In an embodiment, the RNA sequence corresponding to the codon optimised DNA sequence of SEQ ID No: 417 is provided herein as SEQ ID No: 418, as follows:

[SEQ ID No: 418]
AUGGCCACCGACAUCGACAUGCUGAUCGACCUGGGCCUCGACCUGAGCGACUCUGACCUGGAUGAAGAUCCUCCUGAG
CCUGCCGAGAGCAGAAGGGACGAUCUGGAAAGCGAUAGCAGCGGCGAGUGUAGCAGCAGCGACGAGGACAUGGAAGAU
CCCCACGGCGAGGAUGGACCUGAGCCUAUUCUGGAUGCCGCCAGACCUGCCGUCAGACCUUCUAGACCUGAAGAUCCA
GGCGUGCCCAGCACACAGACCCCUAGACCUACAGAGAGACAGGGCCCCAACGAUCCUCAGCCUGCUCCUCAUAGCGUG
UGGUCUAGACUGGGAGCCAGAAGGCCUAGCUGUAGCCCUGAACAGCACGGCGGAAAAGUGGCCAGACUGCAGCCUCCU
CCAACAAAGGCUCAACCUGCUAGAGGCGGCAGACGGGGCAGAAGAAGAGGUAGAGGAAGAGGUGGACCUGGCGCCGCU
GAUGGACUGUCUGAUCCUAGAAGAAGGGCCCCUCGGACCAACAGAAAUCCUGGCGGACCUAGACCAGGCGCCGGAUGG
ACAGAUGGACCAGGUGCUCCACAUGGCGAGGCUUGGAGAGGAUCUGAGCAGCCUGAUCCUCCAGGCGGCCAAAGAACA
AGAGGCGUUAGACAGGCUCCUCCUCCUCUGAUGACCCUGGCUAUUGCUCCUCCACCAGCCGAUCCUAGAGCACCCGCU
CCAGAAAGAAAAGCCCCUGCCGCCGAUACCAUCGACGCCACAACAAGACUGGUGCUGCGGAGCAUCUCUGAGAGGGCC
GCUGUGGAUAGAAUCAGCGAGAGCUUUGGGAGAAGCGCCCAAGUGAUGCACGACCCUUUUGGCGGCCAGCCUUUUCCU
GCCGCCAAUUCUCCUUGGGCUCCUGUGCUUGCUGGACAAGGCGGCCCUUUUGACGCCGAGACAAGAAGAGUGUCCUGG
GAGACACUGGUGGCCCACGGACCUAGCCUGUACAGAACAUUCGCCGGCAAUCCAAGAGCCGCCAGCACAGCCAAAGCC
AUGAGAGACUGCGUGCUGAGACAAGAGAACUUCAUCGAGGCCCUGGCCAGCGCCGAUGAGACACUUGCUUGGUGCAAG
AUGUGCAUCCACCACAACCUGCCUCUGAGGCCACAGGACCCUAUCAUCGGAACAACAGCUGCCGUGCUGGAUAACCUG
GCUACCAGACUGAGGCCCUUCCUGCAGUGCUACCUGAAGGCCAGAGGACUGUGUGGCCUGGAUGAGCUGUGCUCCAGA
AGAAGGCUGGCUGACAUCAAGGAUAUCGCCAGCUUCGUGUUCGUGAUUCUGGCCCGGCUGGCCAACAGAGUGGAAAGA
GGCGUGGCCGAGAUCGACUAUGCCACACUCGGAGUUGGCGUGGGCGAGAAGAUGCACUUUUAUCUGCCUGGCGCCUGC
AUGGCCGGCCUGAUCGAAAUUCUGGACACCCACAGACAAGAGUGCAGCUCCAGAGUGUGCGAGCUGACAGCCUCUCAC
AUUGUGGCCCCUCCAUACGUGCACGGCAAGUACUUCUACUGCAACAGCCUGUUC

[0838] Hence, preferably the RNA construct comprises a sequence substantially as set out in SEQ ID No: 418, or a fragment or variant thereof.

[0839] In one embodiment, the at least one IIP is HSV1VP24 (F8RDC3; Capsid scaffolding protein VP24 cleavage product of UL26 Human herpesvirus 1), or an orthologue thereof. One embodiment of the polypeptide sequence of HSV1 VP24 is represented herein as SEQ ID No: 419, as follows:

[SEQ ID No: 419]
MAADAPGDRMEEPLPDRAVPIYVAGFLALYDSGDSGELALDPDTVRAALPPDNPLPINVDHRAGCEVGRVLAVVDDPR
GPFFVGLIACVQLERVLETAASAAIFERRGPPLSREERLLYLITNYLPSVSLATKRLGGEAHPDRTLFAHVALCAIGR
RLGTIVTYDTGLDAAIAPFRHLSPASREGARRLAAEAELALSGRTWAPGVEALTHTLLSTAVNNMMLRDRWSLVAERR
RQAGIAGHTYLQA

[0840] Therefore, preferably the RNA construct comprises a nucleotide sequence which encodes an amino acid sequence substantially as set out in SEQ ID No: 419, or a variant or fragment thereof.

[0841] In one embodiment, the HSV1VP24 polypeptide is encoded by the DNA nucleotide sequence of SEQ ID No: 420, as follows:

[SEQ ID No: 420]
ATGGCAGCCGATGCCCCGGGAGACAGGATGGAGGAGCCCCTGCCAGACAG
GGCCGTGCCCATTTACGTGGCTGGGTTTTTGGCCCTGTATGACAGCGGGG
ACTCGGGCGAGTTGGCATTGGATCCGGATACGGTGCGGGCGGCCCTGCCT
CCGGATAACCCACTCCCGATTAACGTGGACCACCGCGCTGGCTGCGAGGT
GGGGCGGGTGCTGGCCGTGGTCGACGACCCCCGCGGGCCGTTTTTTGTGG
GGCTGATCGCCTGCGTGCAGCTGGAGCGCGTCCTCGAGACGGCCGCCAGC
GCTGCGATTTTCGAGCGCCGCGGGCCGCCGCTCTCCCGGGAGGAGCGCCT
GTTGTACCTGATCACCAACTACCTGCCCTCGGTCTCCCTGGCCACAAAAC
GCCTGGGGGGCGAGGCGCACCCCGATCGCACGCTGTTCGCGCACGTCGCG
CTGTGCGCGATCGGGAGGCGCCTCGGCACTATCGTCACCTACGACACCGG
TCTCGACGCCGCCATCGCGCCCTTTCGCCACCTGTCGCCGGCGTCTCGCG
AGGGGGCGCGGCGACTGGCCGCCGAGGCCGAGCTCGCGCTGTCCGGACGC
ACCTGGGCGCCCGGCGTGGAGGCGCTGACCCACACGCTGCTTTCCACCGC
CGTTAACAACATGATGCTGCGGGACCGCTGGAGCCTGGTGGCCGAGCGGC
GGCGGCAGGCCGGGATTGCCGGACACACCTACCTCCAGGCG

[0842] Accordingly, preferably the HSV1 VP24 polypeptide is encoded by the DNA nucleotide sequence substantially as set out in SEQ ID NO: 420, or a variant or fragment thereof.

[0843] One embodiment of codon optimised nucleic acid (DNA) encoding the HSV1 VP24 polypeptide is provided herein as SEQ ID No: 421, as follows:

[SEQ ID No: 421]
ATGGCTGCTGATGCCCCTGGCGACAGAATGGAAGAACCCCTGCCTGATAG
AGCCGTGCCTATCTACGTGGCCGGATTTCTGGCCCTGTACGACTCTGGCG
ATTCTGGCGAACTGGCCCTGGATCCTGATACAGTCAGAGCCGCTCTGCCT
CCTGACAACCCTCTGCCAATCAACGTGGACCACAGAGCCGGCTGTGAAGT
GGGAAGAGTGCTGGCCGTGGTGGACGATCCTAGAGGCCCTTTCTTTGTGG
GCCTGATCGCCTGCGTGCAGCTGGAAAGAGTTCTGGAAACAGCCGCCAGC
GCCGCCATCTTCGAAAGAAGAGGACCTCCTCTGAGCCGGGAAGAGAGACT
GCTGTACCTGATCACCAACTACCTGCCTAGCGTGTCCCTGGCCACAAAGA
GACTTGGCGGAGAGGCCCATCCTGACAGAACCCTGTTTGCCCATGTGGCC
CTGTGTGCCATTGGTAGAAGGCTGGGCACCATCGTGACCTACGATACAGG
ACTGGACGCCGCTATCGCCCCATTCAGACATCTGAGCCCTGCCAGCAGAG
AAGGCGCCAGAAGGCTTGCTGCTGAAGCCGAACTGGCTCTGAGCGGCAGA
ACATGGGCTCCAGGTGTTGAAGCCCTGACACACACCCTGCTGAGCACCGC
CGTGAACAACATGATGCTGCGGGACAGATGGTCCCTGGTGGCCGAGAGAA
GAAGGCAGGCTGGAATTGCCGGCCACACATATCTGCAGGCT

[0844] Hence, preferably the RNA construct is encoded by a DNA sequence substantially as set out in SEQ ID No: 421, or a fragment or variant thereof.

[0845] In an embodiment, the RNA sequence corresponding to the codon optimised DNA sequence of SEQ ID No: 421 is provided herein as SEQ ID No: 422, as follows:

[SEQ ID No: 422]
AUGGCUGCUGAUGCCCCUGGCGACAGAAUGGAAGAACCCCUGCCUGAUAG
AGCCGUGCCUAUCUACGUGGCCGGAUUUCUGGCCCUGUACGACUCUGGCG
AUUCUGGCGAACUGGCCCUGGAUCCUGAUACAGUCAGAGCCGCUCUGCCU
CCUGACAACCCUCUGCCAAUCAACGUGGACCACAGAGCCGGCUGUGAAGU
GGGAAGAGUGCUGGCCGUGGUGGACGAUCCUAGAGGCCCUUUCUUUGUGG
GCCUGAUCGCCUGCGUGCAGCUGGAAAGAGUUCUGGAAACAGCCGCCAGC
GCCGCCAUCUUCGAAAGAAGAGGACCUCCUCUGAGCCGGGAAGAGAGACU
GCUGUACCUGAUCACCAACUACCUGCCUAGCGUGUCCCUGGCCACAAAGA
GACUUGGCGGAGAGGCCCAUCCUGACAGAACCCUGUUUGCCCAUGUGGCC
CUGUGUGCCAUUGGUAGAAGGCUGGGCACCAUCGUGACCUACGAUACAGG
ACUGGACGCCGCUAUCGCCCCAUUCAGACAUCUGAGCCCUGCCAGCAGAG
AAGGCGCCAGAAGGCUUGCUGCUGAAGCCGAACUGGCUCUGAGCGGCAGA
ACAUGGGCUCCAGGUGUUGAAGCCCUGACACACACCCUGCUGAGCACCGC
CGUGAACAACAUGAUGCUGCGGGACAGAUGGUCCCUGGUGGCCGAGAGAA
GAAGGCAGGCUGGAAUUGCCGGCCACACAUAUCUGCAGGCU

[0846] Hence, preferably the RNA construct comprises a sequence substantially as set out in SEQ ID No: 422, or a fragment or variant thereof.

[0847] In one embodiment, the at least one IIP is Murine CTMV M45 (Q06A28; Ribonucleoside-diphosphate reductase large subunit-like protein Murine herpesvirus 1 (strain Smith) Murine Cytomegalovirus M45 Protein), or an orthologue thereof. Fliss P, Pechenick Jowers T et al (2012) Viral Mediated Redirection of NEMO/IKKγ to Autophagosomes Curtails the Inflammatory Cascade. PLoS Pathogens 8, 2. It is believed that M45 induces proteasome-independent degradation of NEMO. One embodiment of the polypeptide sequence of Murine CTMV M45 is represented herein as SEQ ID No: 423, as follows:

[SEQ ID No: 423]
MDRQPKVYSDPDNGFFFLDVPMPDDGQGGQQTATTAAGGAFGVGGGHSVP
YVRIMNGVSGIQIGNHNAMSIASCWSPSYTDRRRRSYPKTATNAAADRVA
AAVSAANAAVNAAAAAAAAGGGGGANLLAAAVTCANQRGCCGGNGGHSLP
PTRMPKTNATAAAAPAVAGASNAKSDNNHANATSGAGSAAATPAATTPAA
TAVENRRPSPSPSTASTAPCDEGSSPRHHRPSHVSVGTQATPSTPIPIPA
PRCSTGQQQQQPQAKKLKPAKADPLLYAATMPPPASVTTAAAAAVAPESE
SSPAASAPPAAAAMATGGDDEDQSSFSFVSDDVLGEFEDLRIAGLPVRDE
MRPPTPTMTVIPVSRPFRAGRDSGRDALFDDAVESVRCYCHGILGNSRFC
ALVNEKCSEPAKERMARIRRYAADVTRCGPLALYTAIVSSANRLIQTDPS
CDLDLAECYVETASKRNAVPLSAFYRDCDRLRDAVAAFFKTYGMVVDAMA
QRITERVGPALGRGLYSTVVMMDRCGNSFQGREETPISVFARVAAALAVE
CEVDGGVSYKILSSKPVDAAQAFDAFLSALCSFAIIPSPRVLAYAGFGGS
NPIFDAVSYRAQFYSAESTINGTLHDICDMVTNGLSVSVSAADLGGDIVA
SLHILGQQCKALRPYARFKTVLRIYFDIWSVDALKIFSFILDVGREYEGL
MAFAVNTPRIFWDRYLDSSGDKMWLMFARREAAALCGLDLKSFRNVYEKM
ERDGRSAITVSPWWAVCQLDACVARGNTAVVFPHNVKSMIPENIGRPAVC
GPGVSVVSGGFVGCTPIHELCINLENCVLEGAAVESSVDVVLGLGCRFSF
KALESLVRDAVVLGNLLIDMTVRTNAYGAGKLLTLYRDLHIGVVGFHAVM
NRLGQKFADMESYDLNQRIAEFIYYTAVRASVDLCMAGADPFPKFPKSLY
AAGRFYPDLFDDDERGPRRMTKEFLEKLREDVVKHGIRNASFITGCSADE
AANLAGTTPGFWPRRDNVFLEQTPLMMTPTKDQMLDECVRSVKIEPHRLH
EEDLSCLGENRPVELPVLNSRLRQISKESATVAVRRGRSAPFYDDSDDED
EVACSETGWTVSTDAVIKMCVDRQPFVDHAQSLPVAIGFGGSSVELARHL
RRGNALGLSVGVYKCSMPPSVNYR

[0848] Therefore, preferably the RNA construct comprises a nucleotide sequence which encodes an amino acid sequence substantially as set out in SEQ ID No: 423, or a variant or fragment thereof.

[0849] In one embodiment, the Murine CTMV M45 polypeptide is encoded by the DNA nucleotide sequence of SEQ ID No: 424, as follows:

[SEQ ID No: 424]
ATGGATCGCCAGCCCAAAGTCTACTCCGACCCGGACAACGGATTCTTCTT
TTTGGATGTCCCCATGCCTGACGACGGGCAGGGAGGCCAGCAGACCGCCA
CCACCGCTGCCGGGGGAGCCTTCGGGGTGGGTGGGGGGCACAGCGTGCCC
TACGTCAGGATCATGAATGGAGTCTCTGGAATACAGATCGGAAACCATAA
TGCTATGAGCATCGCCTCTTGCTGGAGTCCCTCCTACACTGACCGACGCC
GCAGGAGCTACCCCAAGACCGCGACCAACGCGGCGGCAGACAGGGTCGCC
GCTGCCGTCTCCGCCGCCAATGCTGCTGTCAATGCTGCTGCCGCGGCTGC
TGCCGCCGGCGGGGGCGGCGGCGCTAACCTACTGGCTGCTGCTGTCACTT
GTGCAAATCAGCGAGGTTGCTGCGGAGGAAATGGGGGGCATTCCCTCCCT
CCCACCCGAATGCCGAAGACCAACGCTACCGCCGCGGCCGCTCCTGCCGT
CGCCGGTGCTTCCAACGCCAAGAGTGACAACAATCACGCTAACGCCACCT
CTGGTGCTGGATCCGCGGCCGCCACCCCCGCCGCCACCACCCCCGCCGCC
ACCGCCGTCGAAAACCGACGACCCAGCCCGAGCCCCTCTACAGCCTCGAC
TGCGCCCTGTGACGAGGGATCTTCTCCTCGCCACCATCGTCCTAGTCACG
TTAGTGTCGGCACTCAGGCGACTCCGTCGACTCCTATCCCGATTCCCGCT
CCCCGGTGCAGCACAGGCCAACAACAACAGCAACCTCAAGCCAAGAAGCT
TAAGCCCGCTAAAGCTGATCCCCTCCTGTACGCGGCGACGATGCCGCCTC
CCGCGAGCGTAACGACCGCCGCTGCCGCTGCCGTCGCCCCTGAATCCGAA
TCCTCACCTGCCGCTTCGGCACCACCAGCAGCAGCAGCGATGGCGACCGG
GGGAGACGACGAAGATCAGTCGTCTTTCTCGTTCGTGAGCGACGACGTCC
TCGGAGAATTCGAAGATCTGCGCATCGCCGGGCTCCCCGTCAGGGACGAG
ATGCGCCCCCCGACCCCGACGATGACGGTCATTCCCGTCAGCAGGCCCTT
CCGCGCGGGGCGCGACAGCGGGCGCGACGCCTTGTTTGACGACGCCGTCG
AGTCCGTGCGCTGCTACTGCCACGGCATCCTCGGCAACAGCCGATTCTGC
GCCCTCGTCAACGAGAAGTGCTCCGAACCCGCCAAGGAGCGCATGGCTCG
CATCCGCCGCTACGCCGCGGACGTGACGCGCTGCGGACCCCTCGCGCTCT
ACACCGCCATCGTCTCCAGCGCCAACCGTCTCATCCAGACCGACCCGTCG
TGCGACCTGGATCTCGCCGAATGTTACGTCGAGACGGCGTCCAAGAGGAA
CGCCGTCCCCCTCTCGGCCTTCTACCGCGACTGCGATCGCCTGCGGGATG
CTGTCGCCGCGTTCTTCAAGACCTACGGCATGGTGGTGGACGCCATGGCG
CAGCGCATCACGGAGCGGGTCGGGCCGGCCCTGGGTAGGGGCCTCTACTC
GACCGTCGTCATGATGGATCGCTGCGGAAACAGCTTCCAGGGACGCGAGG
AGACCCCCATCTCCGTCTTCGCCCGGGTCGCCGCGGCTCTCGCCGTCGAG
TGCGAGGTCGACGGGGGCGTCTCGTACAAGATCCTCAGCTCCAAGCCCGT
CGACGCCGCGCAGGCCTTCGACGCCTTCCTCTCCGCCCTCTGCTCCTTCG
CCATCATCCCCTCGCCGCGGGTCCTGGCCTACGCCGGGTTCGGCGGTTCC
AACCCGATCTTCGACGCCGTTTCTTACCGCGCTCAGTTCTACTCGGCCGA
GAGCACGATCAACGGCACCCTGCACGACATCTGCGACATGGTGACCAACG
GCCTCTCGGTGTCCGTCAGCGCGGCGGACCTCGGAGGCGACATCGTGGCC
TCTCTGCACATCCTCGGACAGCAGTGCAAGGCGCTGCGGCCGTACGCGCG
ATTCAAGACCGTCTTGAGGATCTACTTCGACATCTGGTCCGTCGACGCTC
TCAAGATCTTCTCTTTCATCCTCGACGTCGGGCGGGAATACGAGGGCCTG
ATGGCCTTCGCGGTCAACACGCCGAGGATCTTCTGGGATCGCTACCTAGA
CAGCTCCGGCGACAAGATGTGGCTCATGTTCGCGAGGCGGGAGGCCGCGG
CCCTGTGCGGCCTCGACCTCAAGTCCTTCCGTAACGTCTACGAGAAGATG
GAGCGTGACGGGCGCAGCGCCATCACCGTCTCGCCCTGGTGGGCCGTCTG
TCAGCTCGACGCGTGCGTGGCGCGGGGCAACACGGCCGTGGTCTTCCCTC
ACAACGTCAAGAGTATGATCCCCGAGAACATCGGGCGCCCCGCCGTGTGC
GGACCCGGCGTCTCCGTCGTCTCCGGCGGCTTCGTCGGCTGTACCCCCAT
CCACGAGCTGTGCATCAACCTGGAGAACTGCGTCCTGGAGGGCGCGGCAG
TCGAGAGCTCCGTCGACGTGGTCCTCGGTCTCGGTTGCCGCTTCAGCTTC
AAGGCCCTGGAGTCCCTGGTCCGCGACGCGGTGGTGCTGGGTAACCTGCT
CATCGACATGACCGTGCGCACCAACGCGTACGGCGCCGGCAAGCTCCTGA
CGCTCTATCGCGACCTGCACATCGGGGTCGTCGGCTTCCACGCTGTGATG
AATCGCCTCGGGCAGAAGTTCGCCGACATGGAGTCTTACGACCTCAACCA
GCGTATCGCGGAGTTTATCTACTACACCGCCGTGCGGGCCAGCGTCGACC
TGTGCATGGCGGGCGCCGATCCGTTCCCCAAGTTCCCTAAGAGCCTGTAC
GCGGCCGGCCGCTTCTACCCCGACCTCTTCGACGACGACGAGCGCGGCCC
GCGTCGCATGACCAAGGAGTTCCTCGAGAAACTACGTGAAGACGTGGTGA
AACACGGCATCAGGAACGCCTCCTTCATCACCGGCTGCTCGGCCGACGAA
GCCGCCAACCTGGCGGGCACCACTCCGGGCTTCTGGCCGCGCCGCGACAA
CGTCTTTCTCGAGCAGACGCCGCTCATGATGACCCCGACGAAGGATCAGA
TGCTCGATGAGTGCGTGCGCTCCGTCAAGATCGAGCCCCATCGCCTGCAC
GAGGAGGATCTCTCCTGTCTCGGCGAGAACCGGCCCGTCGAGCTGCCCGT
GCTCAACAGCCGCCTCAGGCAGATCTCGAAAGAGTCCGCGACGGTCGCCG
TGCGCCGCGGCCGCTCGGCGCCCTTCTACGACGACTCGGACGACGAGGAC
GAGGTGGCGTGCTCCGAGACCGGCTGGACCGTGTCGACCGACGCGGTCAT
CAAGATGTGCGTCGACAGACAGCCGTTCGTCGACCATGCGCAGTCGCTGC
CCGTCGCCATCGGCTTCGGGGGGTCTTCGGTGGAATTGGCGCGTCATCTG
AGACGAGGGAACGCTCTGGGACTGTCCGTCGGAGTATATAAATGTAGTAT
GCCCCCTTCCGTGAATTATCGC

[0850] Accordingly, preferably the Murine CTMV M45 polypeptide is encoded by the DNA nucleotide sequence substantially as set out in SEQ ID NO: 424, or a variant or fragment thereof.

[0851] One embodiment of codon optimised nucleic acid (DNA) encoding the Murine CTMV M45 polypeptide is provided herein as SEQ ID No: 425, as follows:

[SEQ ID No: 425]
ATGGACAGACAGCCCAAGGTGTACAGCGACCCCGACAACGGCTTCTTCTT
CCTGGATGTGCCCATGCCTGACGATGGCCAAGGCGGACAGCAGACAGCTA
CAACAGCTGCCGGCGGAGCCTTTGGAGTTGGCGGAGGACATTCTGTGCCC
TACGTGCGGATCATGAATGGCGTGTCCGGCATCCAGATCGGCAACCACAA
CGCCATGTCTATCGCCAGCTGTTGGAGCCCCAGCTACACCGATCGGCGGA
GAAGAAGCTACCCTAAGACCGCCACAAACGCCGCTGCCGATAGAGTGGCT
GCTGCTGTGTCTGCCGCTAACGCTGCTGTGAATGCTGCTGCCGCTGCTGC
AGCCGCAGGCGGCGGAGGCGGAGCTAATCTTCTTGCAGCAGCCGTGACCT
GCGCCAACCAGAGAGGATGTTGCGGAGGAAATGGCGGCCACAGCCTGCCT
CCAACCAGAATGCCTAAGACCAATGCCACAGCCGCTGCAGCTCCAGCAGT
TGCCGGTGCCTCTAATGCCAAGAGCGACAACAACCACGCCAACGCCACAT
CTGGCGCTGGATCTGCTGCTGCTACACCAGCCGCTACAACACCAGCTGCC
ACCGCCGTTGAGAACAGAAGGCCATCTCCAAGTCCTAGCACCGCCAGCAC
AGCCCCTTGTGATGAGGGAAGCAGCCCCAGACACCACAGACCTAGCCATG
TGTCTGTGGGCACACAGGCCACACCTAGCACACCAATTCCTATTCCAGCT
CCTCGGTGCTCCACAGGCCAGCAGCAACAACAGCCTCAGGCCAAGAAGCT
GAAGCCCGCCAAAGCTGACCCTCTGCTGTATGCCGCAACCATGCCTCCTC
CAGCCTCTGTGACTACTGCCGCAGCAGCTGCAGTGGCCCCTGAGTCTGAA
TCTTCTCCTGCCGCTTCTGCCCCTCCAGCAGCCGCCGCTATGGCTACAGG
CGGAGATGATGAGGACCAGAGCAGCTTCTCCTTCGTGTCCGATGATGTGC
TGGGCGAGTTCGAGGACCTGAGAATTGCTGGACTGCCCGTGCGGGATGAG
ATGAGGCCTCCTACACCTACCATGACAGTGATCCCCGTGTCTCGGCCTTT
CAGAGCCGGCAGAGATTCTGGCAGAGATGCCCTGTTCGACGACGCCGTGG
AAAGCGTGCGGTGTTACTGTCACGGCATCCTGGGCAACAGCAGATTCTGC
GCCCTGGTCAACGAGAAGTGTAGCGAGCCTGCCAAAGAACGGATGGCCCG
GATTAGAAGATACGCCGCCGACGTGACAAGATGCGGACCTCTGGCTCTGT
ACACCGCCATTGTGTCTAGCGCCAACCGGCTGATCCAGACAGACCCTAGC
TGTGACCTGGATCTGGCCGAGTGCTACGTGGAAACCGCCTCCAAGAGAAA
CGCCGTGCCTCTGAGCGCCTTCTACAGAGACTGCGACAGACTGAGAGATG
CCGTGGCCGCCTTCTTCAAGACCTACGGCATGGTGGTGGACGCCATGGCT
CAGAGAATCACCGAGAGAGTGGGACCCGCTCTCGGCAGAGGACTGTATTC
TACCGTGGTCATGATGGACAGATGCGGCAACAGCTTCCAGGGCAGAGAAG
AGACACCCATCAGCGTGTTCGCCAGAGTGGCTGCTGCTCTGGCCGTGGAA
TGTGAAGTGGATGGCGGCGTGTCCTACAAGATCCTGAGCAGCAAGCCTGT
GGATGCCGCTCAGGCCTTCGATGCCTTTCTGAGCGCCCTGTGCAGCTTCG
CCATCATTCCATCTCCAAGAGTGCTGGCCTACGCCGGCTTTGGCGGCAGC
AATCCTATCTTTGACGCCGTGTCTTACAGGGCCCAGTTCTACAGCGCCGA
GAGCACCATCAATGGCACCCTGCACGACATCTGCGACATGGTCACAAACG
GCCTGTCCGTGTCTGTGTCTGCCGCTGATCTCGGCGGAGATATCGTGGCC
TCTCTGCACATTCTGGGCCAGCAGTGCAAAGCCCTGAGGCCTTACGCCAG
ATTCAAGACCGTGCTGCGGATCTACTTCGACATTTGGAGCGTGGACGCCC
TGAAGATCTTTAGCTTCATCCTGGACGTGGGGCGCGAGTACGAAGGACTG
ATGGCCTTTGCCGTGAATACCCCTCGGATCTTCTGGGACAGATACCTGGA
CAGCAGCGGCGACAAGATGTGGCTGATGTTTGCCAGAAGAGAAGCCGCCG
CTCTGTGCGGCCTGGATCTGAAGTCCTTCCGGAACGTGTACGAGAAGATG
GAACGCGACGGCCGCTCTGCCATCACAGTTAGTCCTTGGTGGGCCGTGTG
TCAGCTGGATGCCTGTGTGGCCAGAGGCAATACCGCCGTGGTGTTCCCTC
ACAACGTGAAGTCTATGATCCCCGAGAACATCGGCAGGCCAGCCGTGTGT
GGACCTGGCGTTAGTGTTGTGTCTGGCGGCTTCGTGGGCTGCACACCTAT
TCACGAGCTGTGCATCAACCTGGAAAACTGCGTGCTGGAAGGCGCCGCTG
TGGAATCCTCTGTGGATGTGGTGCTCGGCCTGGGCTGCAGATTCAGCTTT
AAGGCCCTGGAAAGCCTCGTGCGGGATGCTGTGGTTCTGGGCAACCTGCT
GATCGACATGACCGTGCGGACCAATGCCTATGGCGCTGGCAAACTGCTGA
CCCTGTACCGGGATCTGCACATCGGCGTTGTGGGATTCCACGCCGTGATG
AACAGACTGGGCCAGAAATTCGCCGACATGGAAAGCTACGACCTGAACCA
GCGGATCGCCGAGTTCATCTACTACACAGCCGTCAGAGCCAGCGTGGACC
TGTGTATGGCTGGCGCCGATCCATTTCCTAAGTTCCCCAAGAGCCTGTAC
GCCGCTGGCAGATTCTACCCCGACCTGTTCGACGACGATGAGAGGGGCCC
TAGACGGATGACCAAAGAGTTCCTGGAAAAGCTGAGGGAAGATGTGGTCA
AGCACGGCATCCGGAACGCCAGCTTTATCACAGGCTGTAGCGCCGACGAG
GCCGCCAATCTTGCTGGAACAACACCCGGCTTTTGGCCCAGACGGGACAA
TGTGTTTCTGGAACAGACCCCTCTGATGATGACCCCTACCAAGGACCAGA
TGCTGGACGAGTGCGTGCGGAGCGTGAAGATCGAACCTCACAGACTGCAC
GAAGAGGACCTGAGCTGCCTGGGCGAGAACAGACCTGTGGAACTGCCCGT
GCTGAACAGCAGACTGCGGCAGATCAGCAAAGAAAGCGCCACCGTGGCCG
TGCGGAGAGGAAGAAGTGCTCCATTCTACGACGACAGCGACGACGAGGAT
GAAGTGGCCTGTTCTGAGACAGGCTGGACCGTGTCTACCGATGCCGTGAT
CAAGATGTGCGTGGACAGACAGCCCTTCGTGGATCACGCTCAGTCTCTGC
CTGTGGCCATCGGCTTTGGAGGCTCTAGCGTGGAACTGGCCAGACACCTG
AGAAGAGGCAATGCCCTGGGACTGTCTGTGGGCGTGTACAAGTGTAGCAT
GCCTCCTAGCGTGAACTACCGG

[0852] Hence, preferably the RNA construct is encoded by a DNA sequence substantially as set out in SEQ ID No: 425, or a fragment or variant thereof.

[0853] In an embodiment, the RNA sequence corresponding to the codon optimised DNA sequence of SEQ ID No: 425 is provided herein as SEQ ID No: 426, as follows:

[SEQ ID No: 426]
AUGGACAGACAGCCCAAGGUGUACAGCGACCCCGACAACGGCUUCUUCUU
CCUGGAUGUGCCCAUGCCUGACGAUGGCCAAGGCGGACAGCAGACAGCUA
CAACAGCUGCCGGCGGAGCCUUUGGAGUUGGCGGAGGACAUUCUGUGCCC
UACGUGCGGAUCAUGAAUGGCGUGUCCGGCAUCCAGAUCGGCAACCACAA
CGCCAUGUCUAUCGCCAGCUGUUGGAGCCCCAGCUACACCGAUCGGCGGA
GAAGAAGCUACCCUAAGACCGCCACAAACGCCGCUGCCGAUAGAGUGGCU
GCUGCUGUGUCUGCCGCUAACGCUGCUGUGAAUGCUGCUGCCGCUGCUGC
AGCCGCAGGCGGCGGAGGCGGAGCUAAUCUUCUUGCAGCAGCCGUGACCU
GCGCCAACCAGAGAGGAUGUUGCGGAGGAAAUGGCGGCCACAGCCUGCCU
CCAACCAGAAUGCCUAAGACCAAUGCCACAGCCGCUGCAGCUCCAGCAGU
UGCCGGUGCCUCUAAUGCCAAGAGCGACAACAACCACGCCAACGCCACAU
CUGGCGCUGGAUCUGCUGCUGCUACACCAGCCGCUACAACACCAGCUGCC
ACCGCCGUUGAGAACAGAAGGCCAUCUCCAAGUCCUAGCACCGCCAGCAC
AGCCCCUUGUGAUGAGGGAAGCAGCCCCAGACACCACAGACCUAGCCAUG
UGUCUGUGGGCACACAGGCCACACCUAGCACACCAAUUCCUAUUCCAGCU
CCUCGGUGCUCCACAGGCCAGCAGCAACAACAGCCUCAGGCCAAGAAGCU
GAAGCCCGCCAAAGCUGACCCUCUGCUGUAUGCCGCAACCAUGCCUCCUC
CAGCCUCUGUGACUACUGCCGCAGCAGCUGCAGUGGCCCCUGAGUCUGAA
UCUUCUCCUGCCGCUUCUGCCCCUCCAGCAGCCGCCGCUAUGGCUACAGG
CGGAGAUGAUGAGGACCAGAGCAGCUUCUCCUUCGUGUCCGAUGAUGUGC
UGGGCGAGUUCGAGGACCUGAGAAUUGCUGGACUGCCCGUGCGGGAUGAG
AUGAGGCCUCCUACACCUACCAUGACAGUGAUCCCCGUGUCUCGGCCUUU
CAGAGCCGGCAGAGAUUCUGGCAGAGAUGCCCUGUUCGACGACGCCGUGG
AAAGCGUGCGGUGUUACUGUCACGGCAUCCUGGGCAACAGCAGAUUCUGC
GCCCUGGUCAACGAGAAGUGUAGCGAGCCUGCCAAAGAACGGAUGGCCCG
GAUUAGAAGAUACGCCGCCGACGUGACAAGAUGCGGACCUCUGGCUCUGU
ACACCGCCAUUGUGUCUAGCGCCAACCGGCUGAUCCAGACAGACCCUAGC
UGUGACCUGGAUCUGGCCGAGUGCUACGUGGAAACCGCCUCCAAGAGAAA
CGCCGUGCCUCUGAGCGCCUUCUACAGAGACUGCGACAGACUGAGAGAUG
CCGUGGCCGCCUUCUUCAAGACCUACGGCAUGGUGGUGGACGCCAUGGCU
CAGAGAAUCACCGAGAGAGUGGGACCCGCUCUCGGCAGAGGACUGUAUUC
UACCGUGGUCAUGAUGGACAGAUGCGGCAACAGCUUCCAGGGCAGAGAAG
AGACACCCAUCAGCGUGUUCGCCAGAGUGGCUGCUGCUCUGGCCGUGGAA
UGUGAAGUGGAUGGCGGCGUGUCCUACAAGAUCCUGAGCAGCAAGCCUGU
GGAUGCCGCUCAGGCCUUCGAUGCCUUUCUGAGCGCCCUGUGCAGCUUCG
CCAUCAUUCCAUCUCCAAGAGUGCUGGCCUACGCCGGCUUUGGCGGCAGC
AAUCCUAUCUUUGACGCCGUGUCUUACAGGGCCCAGUUCUACAGCGCCGA
GAGCACCAUCAAUGGCACCCUGCACGACAUCUGCGACAUGGUCACAAACG
GCCUGUCCGUGUCUGUGUCUGCCGCUGAUCUCGGCGGAGAUAUCGUGGCC
UCUCUGCACAUUCUGGGCCAGCAGUGCAAAGCCCUGAGGCCUUACGCCAG
AUUCAAGACCGUGCUGCGGAUCUACUUCGACAUUUGGAGCGUGGACGCCC
UGAAGAUCUUUAGCUUCAUCCUGGACGUGGGGCGCGAGUACGAAGGACUG
AUGGCCUUUGCCGUGAAUACCCCUCGGAUCUUCUGGGACAGAUACCUGGA
CAGCAGCGGCGACAAGAUGUGGCUGAUGUUUGCCAGAAGAGAAGCCGCCG
CUCUGUGCGGCCUGGAUCUGAAGUCCUUCCGGAACGUGUACGAGAAGAUG
GAACGCGACGGCCGCUCUGCCAUCACAGUUAGUCCUUGGUGGGCCGUGUG
UCAGCUGGAUGCCUGUGUGGCCAGAGGCAAUACCGCCGUGGUGUUCCCUC
ACAACGUGAAGUCUAUGAUCCCCGAGAACAUCGGCAGGCCAGCCGUGUGU
GGACCUGGCGUUAGUGUUGUGUCUGGCGGCUUCGUGGGCUGCACACCUAU
UCACGAGCUGUGCAUCAACCUGGAAAACUGCGUGCUGGAAGGCGCCGCUG
UGGAAUCCUCUGUGGAUGUGGUGCUCGGCCUGGGCUGCAGAUUCAGCUUU
AAGGCCCUGGAAAGCCUCGUGCGGGAUGCUGUGGUUCUGGGCAACCUGCU
GAUCGACAUGACCGUGCGGACCAAUGCCUAUGGCGCUGGCAAACUGCUGA
CCCUGUACCGGGAUCUGCACAUCGGCGUUGUGGGAUUCCACGCCGUGAUG
AACAGACUGGGCCAGAAAUUCGCCGACAUGGAAAGCUACGACCUGAACCA
GCGGAUCGCCGAGUUCAUCUACUACACAGCCGUCAGAGCCAGCGUGGACC
UGUGUAUGGCUGGCGCCGAUCCAUUUCCUAAGUUCCCCAAGAGCCUGUAC
GCCGCUGGCAGAUUCUACCCCGACCUGUUCGACGACGAUGAGAGGGGCCC
UAGACGGAUGACCAAAGAGUUCCUGGAAAAGCUGAGGGAAGAUGUGGUCA
AGCACGGCAUCCGGAACGCCAGCUUUAUCACAGGCUGUAGCGCCGACGAG
GCCGCCAAUCUUGCUGGAACAACACCCGGCUUUUGGCCCAGACGGGACAA
UGUGUUUCUGGAACAGACCCCUCUGAUGAUGACCCCUACCAAGGACCAGA
UGCUGGACGAGUGCGUGCGGAGCGUGAAGAUCGAACCUCACAGACUGCAC
GAAGAGGACCUGAGCUGCCUGGGCGAGAACAGACCUGUGGAACUGCCCGU
GCUGAACAGCAGACUGCGGCAGAUCAGCAAAGAAAGCGCCACCGUGGCCG
UGCGGAGAGGAAGAAGUGCUCCAUUCUACGACGACAGCGACGACGAGGAU
GAAGUGGCCUGUUCUGAGACAGGCUGGACCGUGUCUACCGAUGCCGUGAU
CAAGAUGUGCGUGGACAGACAGCCCUUCGUGGAUCACGCUCAGUCUCUGC
CUGUGGCCAUCGGCUUUGGAGGCUCUAGCGUGGAACUGGCCAGACACCUG
AGAAGAGGCAAUGCCCUGGGACUGUCUGUGGGCGUGUACAAGUGUAGCAU
GCCUCCUAGCGUGAACUACCGG

[0854] In another embodiment, the inhibitor of an innate signalling pathway is Pangolin CoV-2 ORF3b*57 variant protein, (i.e. a mutated form the Pangolin CoV-2 ORF3b protein where a premature stop codon has been altered to AA glutamine (NCBI Reference Sequence: QIG55946.1; UniProtKB—A0A6M3G7Q4 (A0A6M3G7Q4_9BETC)), or an orthologue thereof (Konno Y, Kimura I, Uriu K, Fukushi M, Irie T, Koyanagi Y, Sauter D, Gifford R, USFQ-COVID19 Consortium, Nakagawa S and Sato K. 2020. SARS-CoV-2 ORF3b is a potent interferon antagonist whose activity is increased by a naturally occurring elongation variant. Cell Reports 32: Issue 12. doi.org/10.116/j.celrep.2020.108185. One embodiment of the Pangolin CoV-2 ORF3b*57 is represented herein as SEQ ID No: 427, as follows:

[SEQ ID No: 427]
MMLTTSCVGILIVTTIVFHTIVQLLQLSLPPVMAQQIPLQNMTTKLVVIL
RNGNLE

[0855] Therefore, preferably the RNA construct comprises a nucleotide sequence which encodes an amino acid sequence substantially as set out in SEQ ID No: 427, or a variant or fragment thereof.

[0856] In one embodiment, the Pangolin CoV-2 ORF3b*57 polypeptide is encoded by the DNA nucleotide sequence of SEQ ID No: 428, as follows:

[SEQ ID No: 428]
ATGATGCTAACTACTTCCTGTGTTGGCATACTAATTGTTACGACTATTGT
ATTCCATACAATAGTGCAACTTCTTCAATTGTCATTACCTCCGGTGATGG
CACAACAAATCCCATTACAGAACATGACTACCAAATTGGTGGTTATTTTG
AGAAATGGGAATCTGGAG

[0857] Accordingly, preferably the Pangolin CoV-2 ORF3b*57 polypeptide is encoded by the DNA nucleotide sequence substantially as set out in SEQ ID NO: 428, or a variant or fragment thereof.

[0858] Thus, the RNA construct may comprise an RNA nucleotide sequence of SEQ ID No: 429, as follows:

[SEQ ID No: 429]
AUGAUGCUAACUACUUCCUGUGUUGGCAUACUAAUUGUUACGACUAUUGU
AUUCCAUACAAUAGUGCAACUUCUUCAAUUGUCAUUACCUCCGGUGAUGG
CACAACAAAUCCCAUUACAGAACAUGACUACCAAAUUGGUGGUUAUUUUG
AGAAAUGGGAAUCUGGAG

[0859] Therefore, preferably the RNA construct comprises an RNA nucleotide sequence substantially as set out in SEQ ID No: 429, or a variant or fragment thereof.

[0860] The inventors then subjected the protein sequence of SEQ ID No: 442 to codon optimisation for human expression, and one embodiment of the codon optimised nucleic acid (DNA) sequence that includes that includes a start (ATG) and a stop (TGA) codon is provided herein as SEQ ID No: 430, as follows:

[SEQ ID No: 430]
ATGATGCTGACCACCAGCTGTGTGGGCATCCTGATCGTGACCACCATCGT
GTTCCACACAATCGTGCAGCTGCTGCAGCTCAGCCTGCCTCCTGTTATGG
CCCAGCAGATCCCTCTGCAGAACATGACCACAAAGCTGGTCGTGATCCTG
CGGAACGGCAACCTGGAATGA

[0861] Hence, preferably the RNA construct is encoded by a DNA sequence substantially as set out in SEQ ID No: 430, or a fragment or variant thereof.

[0862] In an embodiment, the RNA sequence corresponding to the codon optimised DNA sequence of SEQ ID No: 430 that includes a start (AUG) and a stop (UGA) codon is provided herein as SEQ ID No: 431, as follows:

[SEQ ID No: 431]
AUGAUGCUGACCACCAGCUGUGUGGGCAUCCUGAUCGUGACCACCAUCGU
GUUCCACACAAUCGUGCAGCUGCUGCAGCUCAGCCUGCCUCCUGUUAUGG
CCCAGCAGAUCCCUCUGCAGAACAUGACCACAAAGCUGGUCGUGAUCCUG
CGGAACGGCAACCUGGAAUGA

[0863] Hence, preferably the RNA construct comprises a sequence substantially as set out in SEQ ID No: 431, or a fragment or variant thereof.

[0864] In another embodiment, the inhibitor of an innate signalling pathway is Pangolin CoV-2 ORF3b*79 variant protein, (i.e. a mutated form the Pangolin CoV-2 ORF3b protein where a premature stop codon has been altered to AA glutamine (NCBI Reference Sequence: QIG55946.1; UniProtKB—A0A6M3G7Q4 (A0A6M3G7Q4_9BETC)), or an orthologue thereof (Konno Y, Kimura I, Uriu K, Fukushi M, Irie T, Koyanagi Y, Sauter D, Gifford R, USFQ-COVID19 Consortium, Nakagawa S and Sato K. 2020. SARS-CoV-2 ORF3b is a potent interferon antagonist whose activity is increased by a naturally occurring elongation variant. Cell Reports 32: Issue 12. doi.org/10.116/j.celrep.2020.108185. One embodiment of the Pangolin CoV-2 ORF3b*79 is represented herein as SEQ ID No: 432, as follows:

[SEQ ID No: 432]
MMLTTSCVGILIVTTIVFHTIVQLLQLSLPPVMAQQIPLQNMTTKLVVIL
RNGNLELKTVLYYTATSLQITTSCTQLN

[0865] Therefore, preferably the RNA construct comprises a nucleotide sequence which encodes an amino acid sequence substantially as set out in SEQ ID No: 432, or a variant or fragment thereof.

[0866] In one embodiment, the Pangolin CoV-2 ORF3b*79 polypeptide is encoded by the DNA nucleotide sequence of SEQ ID No: 433, as follows:

[SEQ ID No: 433]
ATGATGCTAACTACTTCCTGTGTTGGCATACTAATTGTTACGACTATTGT
ATTCCATACAATAGTGCAACTTCTTCAATTGTCATTACCTCCGGTGATGG
CACAACAAATCCCATTACAGAACATGACTACCAAATTGGTGGTTATTTTG
AGAAATGGGAATCTGGAGCTGAAGACTGTGTTGTATTACACAGCTACTTC
ACTTCAGATTACTACCAGCTGTACTCAACTCAAT

[0867] Accordingly, preferably the Pangolin CoV-2 ORF3b*79 polypeptide is encoded by the DNA nucleotide sequence substantially as set out in SEQ ID NO: 433, or a variant or fragment thereof.

[0868] Thus, the RNA construct may comprise an RNA nucleotide sequence of SEQ ID No: 434, as follows:

[SEQ ID No: 434]
AUGAUGCUAACUACUUCCUGUGUUGGCAUACUAAUUGUUACGACUAUUGU
AUUCCAUACAAUAGUGCAACUUCUUCAAUUGUCAUUACCUCCGGUGAUGG
CACAACAAAUCCCAUUACAGAACAUGACUACCAAAUUGGUGGUUAUUUUG
AGAAAUGGGAAUCUGGAGCUGAAGACUGUGUUGUAUUACACAGCUACUUC
ACUUCAGAUUACUACCAGCUGUACUCAACUCAAU

[0869] Therefore, preferably the RNA construct comprises an RNA nucleotide sequence substantially as set out in SEQ ID No: 434, or a variant or fragment thereof.

[0870] The inventors then subjected the protein sequence of SEQ ID No: 432 to codon optimisation for human expression, and one embodiment of the codon optimised nucleic acid (DNA) sequence that includes that includes a start (ATG) and a stop (TGA) codon is provided herein as SEQ ID No: 435, as follows:

[SEQ ID No: 435]
ATGATGCTGACCACCAGCTGTGTGGGCATCCTGATCGTGACCACCATCGTG
TTCCACACAATCGTGCAGCTGCTGCAGCTCAGCCTGCCTCCTGTTATGGCC
CAGCAGATCCCTCTGCAGAACATGACCACAAAGCTGGTCGTGATCCTGCGG
AACGGCAACCTGGAACTGAAAACCGTGCTGTACTACACCGCCACCAGCCTG
CAGATCACCACAAGCTGCACCCAGCTGAACTGA

[0871] Hence, preferably the RNA construct is encoded by a DNA sequence substantially as set out in SEQ ID No: 435, or a fragment or variant thereof.

[0872] In an embodiment, the RNA sequence corresponding to the codon optimised DNA sequence of SEQ ID No: 435 that includes a start (AUG) and a stop (UGA) codon is provided herein as SEQ ID No: 436, as follows:

[SEQ ID No: 436]
AUGAUGCUGACCACCAGCUGUGUGGGCAUCCUGAUCGUGACCACCAUCGUG
UUCCACACAAUCGUGCAGCUGCUGCAGCUCAGCCUGCCUCCUGUUAUGGCC
CAGCAGAUCCCUCUGCAGAACAUGACCACAAAGCUGGUCGUGAUCCUGCGG
AACGGCAACCUGGAACUGAAAACCGUGCUGUACUACACCGCCACCAGCCUG
CAGAUCACCACAAGCUGCACCCAGCUGAACUGA

[0873] Hence, preferably the RNA construct comprises a sequence substantially as set out in SEQ ID No: 436, or a fragment or variant thereof.

[0874] In another embodiment, the inhibitor of an innate signalling pathway is MERS-ORF4a protein (NCBI Reference Sequence: AGV08457.1; UniProtKB—T2BBG6 (T2BBG6_MERS)), or an orthologue thereof. One embodiment of the MERS-ORF4a is represented herein as SEQ ID No: 437, as follows:

[SEQ ID No: 437]
MDYVSLLNQIWQKYLNSPYTTCLYIPKPTAKYTPLVGTSLHPVLWNCQLSF
AGYTESAVNSTKALAKQDAAQRIAWLLHKDGGIPDGCSLYLRHSSLFAQSE
EEESFSN

[0875] Therefore, preferably the RNA construct comprises a nucleotide sequence which encodes an amino acid sequence substantially as set out in SEQ ID No: 437, or a variant or fragment thereof.

[0876] In one embodiment, the MERS-ORF4a polypeptide is encoded by the DNA nucleotide sequence of SEQ ID No: 438, as follows:

[SEQ ID No: 438]
ATGGACTACGTGTCCCTGCTGAACCAGATTTGGCAGAAGTACCTGAACAGC
CCCTACACCACCTGTCTGTACATCCCCAAGCCTACCGCCAAGTACACACCT
CTCGTGGGCACATCTCTGCACCCCGTGCTGTGGAATTGCCAGCTGAGCTTT
GCCGGCTACACCGAGTCTGCCGTGAACAGCACAAAGGCCCTGGCCAAACAG
GACGCCGCTCAGAGAATTGCCTGGCTGCTGCACAAGGATGGCGGCATCCCT
GATGGCTGTAGCCTGTACCTGAGACACAGCAGCCTGTTCGCCCAGAGCGAG
GAAGAGGAATCCTTCAGCAAC

[0877] Accordingly, preferably the MERS-ORF4a polypeptide is encoded by the DNA nucleotide sequence substantially as set out in SEQ ID NO: 438, or a variant or fragment thereof.

[0878] Thus, the RNA construct may comprise an RNA nucleotide sequence of SEQ ID No: 439, as follows:

[SEQ ID No: 439]
AUGGACUACGUGUCCCUGCUGAACCAGAUUUGGCAGAAGUACCUGAACAGC
CCCUACACCACCUGUCUGUACAUCCCCAAGCCUACCGCCAAGUACACACCU
CUCGUGGGCACAUCUCUGCACCCCGUGCUGUGGAAUUGCCAGCUGAGCUUU
GCCGGCUACACCGAGUCUGCCGUGAACAGCACAAAGGCCCUGGCCAAACAG
GACGCCGCUCAGAGAAUUGCCUGGCUGCUGCACAAGGAUGGCGGCAUCCCU
GAUGGCUGUAGCCUGUACCUGAGACACAGCAGCCUGUUCGCCCAGAGCGAG
GAAGAGGAAUCCUUCAGCAAC

[0879] Therefore, preferably the RNA construct comprises an RNA nucleotide sequence substantially as set out in SEQ ID No: 439, or a variant or fragment thereof.

[0880] The inventors then subjected the protein sequence of SEQ ID No: 437 to codon optimisation for human expression, and one embodiment of the codon optimised nucleic acid (DNA) sequence that includes that includes a start (ATG) and a stop (TGA) codon is provided herein as SEQ ID No: 440, as follows:

[SEQ ID No: 440]
ATGGACTACGTGTCCCTGCTGAATCAGATCTGGCAGAAGTACCTGAACAGC
CCCTACACCACCTGTCTGTACATCCCCAAGCCTACCGCCAAGTACACACCT
CTCGTGGGCACATCTCTGCACCCCGTGCTGTGGAATTGCCAGCTGAGCTTT
GCCGGCTACACCGAGAGCGCCGTGAATAGCACAAAGGCCCTGGCCAAACAG
GACGCCGCTCAGAGAATTGCCTGGCTGCTGCACAAGGATGGCGGCATCCCT
GATGGCTGTAGCCTGTACCTGAGACACAGCAGCCTGTTCGCCCAGAGCGAG
GAAGAGGAATCCTTCAGCAACTGA

[0881] Hence, preferably the RNA construct is encoded by a DNA sequence substantially as set out in SEQ ID No: 440 or a fragment or variant thereof.

[0882] In an embodiment, the RNA sequence corresponding to the codon optimised DNA sequence of SEQ ID No: 440 that includes a start (AUG) and a stop (UGA) codon is provided herein as SEQ ID No: 441, as follows:

[SEQ ID No: 441]
AUGGACUACGUGUCCCUGCUGAAUCAGAUCUGGCAGAAGUACCUGAACAGC
CCCUACACCACCUGUCUGUACAUCCCCAAGCCUACCGCCAAGUACACACCU
CUCGUGGGCACAUCUCUGCACCCCGUGCUGUGGAAUUGCCAGCUGAGCUUU
GCCGGCUACACCGAGAGCGCCGUGAAUAGCACAAAGGCCCUGGCCAAACAG
GACGCCGCUCAGAGAAUUGCCUGGCUGCUGCACAAGGAUGGCGGCAUCCCU
GAUGGCUGUAGCCUGUACCUGAGACACAGCAGCCUGUUCGCCCAGAGCGAG
GAAGAGGAAUCCUUCAGCAACUGA

[0883] Hence, preferably the RNA construct comprises a sequence substantially as set out in SEQ ID No: 441, or a fragment or variant thereof.

[0884] In another embodiment, the inhibitor of an innate signalling pathway is BVDV nPro protein (NCBI Reference Sequence: AAA42854.1; UniProtKB—P19711 (POLG_BVDVN)), or an orthologue thereof. One embodiment of the BVDV nPro is represented herein as SEQ ID No:442, as follows:

[SEQ ID No: 442]
MELITNELLYKTYKQKPVGVEEPVYDQAGDPLFGERGAVHPQSTLKLPHKR
GERDVPTNLASLPKRGDCRTGNSRGPVSGIYLKPGPLFYQDYKGPVYHRAP
LELFEEGSMCETTKRIGRVTGSDGKLYHIYVCIDGCIIIKSATRSYQRVFR
WVHNRLDCPLWVTSC

[0885] Therefore, preferably the RNA construct comprises a nucleotide sequence which encodes an amino acid sequence substantially as set out in SEQ ID No: 442, or a variant or fragment thereof.

[0886] In one embodiment, the BVDV nPro polypeptide is encoded by the DNA nucleotide sequence of SEQ ID No: 443, as follows:

[SEQ ID No: 443]
ATGGAGTTGATCACAAATGAACTTTTATACAAAACATACAAACAAAAACCC
GTCGGGGTGGAGGAACCTGTTTATGATCAGGCAGGTGATCCCTTATTTGGT
GAAAGGGGAGCAGTCCACCCTCAATCGACGCTAAAGCTCCCACACAAGAGA
GGGGAACGCGATGTTCCAACCAACTTGGCATCCTTACCAAAAAGAGGTGAC
TGCAGGACGGGTAATAGCAGAGGACCTGTGAGCGGGATCTACCTGAAGCCA
GGGCCACTATTTTACCAGGACTATAAAGGTCCCGTCTATCACAGGGCCCCG
CTGGAGCTCTTTGAGGAGGGATCCATGTGTGAAACGACTAAACGGATAGGG
AGAGTAACTGGAAGTGACGGAAAGCTGTACCACATTTATGTGTGTATAGAT
GGATGTATAATAATAAAAAGTGCCACGAGAAGTTACCAAAGGGTGTTCAGG
TGGGTCCATAATAGGCTTGACTGCCCTCTATGGGTCACAAGTTGC

[0887] Accordingly, preferably the BVDV nPro polypeptide is encoded by the DNA nucleotide sequence substantially as set out in SEQ ID NO:443, or a variant or fragment thereof.

[0888] Thus, the RNA construct may comprise an RNA nucleotide sequence of SEQ ID No:444, as follows:

[SEQ ID No: 444]
AUGGAGUUGAUCACAAAUGAACUUUUAUACAAAACAUACAAACAAAAACCC
GUCGGGGUGGAGGAACCUGUUUAUGAUCAGGCAGGUGAUCCCUUAUUUGGU
GAAAGGGGAGCAGUCCACCCUCAAUCGACGCUAAAGCUCCCACACAAGAGA
GGGGAACGCGAUGUUCCAACCAACUUGGCAUCCUUACCAAAAAGAGGUGAC
UGCAGGACGGGUAAUAGCAGAGGACCUGUGAGCGGGAUCUACCUGAAGCCA
GGGCCACUAUUUUACCAGGACUAUAAAGGUCCCGUCUAUCACAGGGCCCCG
CUGGAGCUCUUUGAGGAGGGAUCCAUGUGUGAAACGACUAAACGGAUAGGG
AGAGUAACUGGAAGUGACGGAAAGCUGUACCACAUUUAUGUGUGUAUAGAU
GGAUGUAUAAUAAUAAAAAGUGCCACGAGAAGUUACCAAAGGGUGUUCAGG
UGGGUCCAUAAUAGGCUUGACUGCCCUCUAUGGGUCACAAGUUGC

[0889] Therefore, preferably the RNA construct comprises an RNA nucleotide sequence substantially as set out in SEQ ID No:444, or a variant or fragment thereof.

[0890] The inventors then subjected the protein sequence of SEQ ID No: 442 to codon optimisation for human expression, and one embodiment of the codon optimised nucleic acid (DNA) sequence that includes that includes a start (ATG) and a stop (TGA) codon is provided herein as SEQ ID No: 445, as follows:

[SEQ ID No: 445]
ATGGAACTGATCACCAACGAGCTGCTGTACAAGACCTACAAGCAGAAACCC
GTGGGCGTCGAGGAACCCGTGTATGATCAAGCTGGCGACCCTCTGTTTGGC
GAGAGAGGCGCTGTTCACCCTCAGAGCACACTGAAGCTGCCCCACAAGCGG
GGCGAAAGAGATGTGCCTACCAACCTGGCCAGCCTGCCTAAGAGAGGCGAT
TGCAGAACCGGCAATAGCAGAGGCCCTGTGTCCGGCATCTACCTGAAACCT
GGACCACTGTTCTACCAGGACTACAAGGGCCCCGTGTACCACAGAGCACCC
CTGGAACTTTTCGAAGAGGGCAGCATGTGCGAAACCACCAAGCGGATCGGA
AGAGTGACCGGCTCTGACGGCAAGCTGTACCACATCTACGTGTGCATCGAC
GGCTGCATCATCATCAAGAGCGCCACCAGATCCTACCAGCGGGTGTTCAGA
TGGGTGCACAACAGACTGGACTGCCCTCTGTGGGTCACCAGCTGCTGA

[0891] Hence, preferably the RNA construct is encoded by a DNA sequence substantially as set out in SEQ ID No: 445, or a fragment or variant thereof.

[0892] In an embodiment, the RNA sequence corresponding to the codon optimised DNA sequence of SEQ ID No: 445 that includes a start (AUG) and a stop (UGA) codon is provided herein as SEQ ID No: 446, as follows:

[SEQ ID No: 446]
AUGGAACUGAUCACCAACGAGCUGCUGUACAAGACCUACAAGCAGAAACCC
GUGGGCGUCGAGGAACCCGUGUAUGAUCAAGCUGGCGACCCUCUGUUUGGC
GAGAGAGGCGCUGUUCACCCUCAGAGCACACUGAAGCUGCCCCACAAGCGG
GGCGAAAGAGAUGUGCCUACCAACCUGGCCAGCCUGCCUAAGAGAGGCGAU
UGCAGAACCGGCAAUAGCAGAGGCCCUGUGUCCGGCAUCUACCUGAAACCU
GGACCACUGUUCUACCAGGACUACAAGGGCCCCGUGUACCACAGAGCACCC
CUGGAACUUUUCGAAGAGGGCAGCAUGUGCGAAACCACCAAGCGGAUCGGA
AGAGUGACCGGCUCUGACGGCAAGCUGUACCACAUCUACGUGUGCAUCGAC
GGCUGCAUCAUCAUCAAGAGCGCCACCAGAUCCUACCAGCGGGUGUUCAGA
UGGGUGCACAACAGACUGGACUGCCCUCUGUGGGUCACCAGCUGCUGA

[0893] Hence, preferably the RNA construct comprises a sequence substantially as set out in SEQ ID No:446, or a fragment or variant thereof.

[0894] In another embodiment, the inhibitor of an innate signalling pathway is HSV US1 protein (NCBI Reference Sequence: CAB06708.1; UniProtKB—P89474 (ICP22_HHV2H)), or an orthologue thereof. One embodiment of the HSV US1 is represented herein as SEQ ID No: 447, as follows:

[SEQ ID No: 447]
MVRDCYLMGYCRTRLGPRTWGRLLQISGGTWDVRLRNAIREVEAHFEPAAE
PVCELPCLNARRYGPECDVGNLETNGGSTSDDEISDATDSDDTLASHSDTE
GGPSPAGRENPESASGGAIAARLECEFGTFDWTSEEGSQPWLSAVVADTSS
AERSGLPAPGACRATEAPEREDGCRKMRFPAACPYPCGHTFLRP

[0895] Therefore, preferably the RNA construct comprises a nucleotide sequence which encodes an amino acid sequence substantially as set out in SEQ ID No: 447, or a variant or fragment thereof.

[0896] In one embodiment, the HSV US1 polypeptide is encoded by the DNA nucleotide sequence of SEQ ID No:448, as follows:

[SEQ ID No: 448]
ATGGTGCGAGACTGCTACCTCATGGGCTACTGCCGGACCCGCCTGGGGCCG
CGCACGTGGGGCCGCCTGCTGCAGATCTCGGGCGGAACCTGGGACGTGCGC
CTGCGAAACGCAATCCGGGAGGTCGAGGCGCATTTTGAACCCGCCGCCGAG
CCCGTGTGCGAGCTGCCCTGTCTGAACGCCAGGCGTTACGGCCCCGAGTGT
GATGTTGGCAATCTCGAGACCAACGGCGGCTCGACGAGCGATGATGAGATA
TCGGATGCGACGGACTCGGACGATACCCTCGCGTCCCATTCCGACACGGAG
GGGGGGCCCTCCCCGGCCGGCCGGGAGAACCCGGAATCCGCGTCCGGCGGG
GCTATCGCGGCTCGGCTGGAGTGTGAGTTTGGGACGTTTGACTGGACGTCC
GAGGAGGGCTCCCAGCCCTGGCTGTCCGCGGTGGTCGCCGATACCAGCTCC
GCCGAACGCTCTGGCCTACCCGCCCCGGGCGCGTGTCGCGCAACGGAAGCC
CCAGAACGCGAGGACGGGTGCCGAAAAATGCGCTTCCCCGCCGCCTGCCCC
TATCCCTGCGGCCACACATTTCTCCGGCCA

[0897] Accordingly, preferably the HSV US1 polypeptide is encoded by the DNA nucleotide sequence substantially as set out in SEQ ID NO:448, or a variant or fragment thereof.

[0898] Thus, the RNA construct may comprise an RNA nucleotide sequence of SEQ ID No: 449, as follows:

[SEQ ID No: 449]
AUGGUGCGAGACUGCUACCUCAUGGGCUACUGCCGGACCCGCCUGGGGCCG
CGCACGUGGGGCCGCCUGCUGCAGAUCUCGGGCGGAACCUGGGACGUGCGC
CUGCGAAACGCAAUCCGGGAGGUCGAGGCGCAUUUUGAACCCGCCGCCGAG
CCCGUGUGCGAGCUGCCCUGUCUGAACGCCAGGCGUUACGGCCCCGAGUGU
GAUGUUGGCAAUCUCGAGACCAACGGCGGCUCGACGAGCGAUGAUGAGAUA
UCGGAUGCGACGGACUCGGACGAUACCCUCGCGUCCCAUUCCGACACGGAG
GGGGGGCCCUCCCCGGCCGGCCGGGAGAACCCGGAAUCCGCGUCCGGCGGG
GCUAUCGCGGCUCGGCUGGAGUGUGAGUUUGGGACGUUUGACUGGACGUCC
GAGGAGGGCUCCCAGCCCUGGCUGUCCGCGGUGGUCGCCGAUACCAGCUCC
GCCGAACGCUCUGGCCUACCCGCCCCGGGCGCGUGUCGCGCAACGGAAGCC
CCAGAACGCGAGGACGGGUGCCGAAAAAUGCGCUUCCCCGCCGCCUGCCCC
UAUCCCUGCGGCCACACAUUUCUCCGGCCA

[0899] Therefore, preferably the RNA construct comprises an RNA nucleotide sequence substantially as set out in SEQ ID No: 449, or a variant or fragment thereof.

[0900] The inventors then subjected the protein sequence of SEQ ID No: 447 to codon optimisation for human expression, and one embodiment of the codon optimised nucleic acid (DNA) sequence that includes that includes a start (ATG) and a stop (TGA) codon is provided herein as SEQ ID No:450, as follows:

[SEQ ID No: 450]
ATGGTCCGAGACTGCTACCTGATGGGCTACTGCAGAACCAGACTGGGCCC
TAGAACATGGGGCAGACTGCTGCAGATCTCTGGCGGCACATGGGATGTGC
GGCTGAGAAACGCCATCAGAGAGGTGGAAGCCCACTTCGAGCCTGCCGCT
GAACCTGTGTGTGAACTGCCCTGTCTGAACGCTAGAAGATACGGCCCTGA
GTGCGACGTGGGCAACCTGGAAACAAATGGCGGCAGCACCAGCGACGACG
AGATCTCTGATGCCACCGACAGCGACGATACACTGGCCAGCCACAGCGAT
ACAGAAGGCGGACCATCTCCTGCCGGAAGAGAGAATCCTGAGTCTGCCTC
TGGCGGAGCTATCGCCGCTAGACTGGAATGCGAGTTCGGCACCTTCGACT
GGACAAGCGAGGAAGGCTCTCAGCCTTGGCTGTCTGCTGTGGTGGCCGAT
ACAAGCAGCGCCGAAAGATCTGGACTTCCTGCTCCTGGCGCCTGCAGAGC
TACAGAAGCTCCTGAAAGAGAGGACGGCTGCAGAAAGATGCGGTTCCCTG
CCGCCTGTCCTTATCCTTGCGGCCACACATTTCTGCGGCCCTGA

[0901] Hence, preferably the RNA construct is encoded by a DNA sequence substantially as set out in SEQ ID No: 450, or a fragment or variant thereof.

[0902] In an embodiment, the RNA sequence corresponding to the codon optimised DNA sequence of SEQ ID No: 450 that includes a start (AUG) and a stop (UGA) codon is provided herein as SEQ ID No:451, as follows:

[SEQ ID No: 451]
AUGGUCCGAGACUGCUACCUGAUGGGCUACUGCAGAACCAGACUGGGCCC
UAGAACAUGGGGCAGACUGCUGCAGAUCUCUGGCGGCACAUGGGAUGUGC
GGCUGAGAAACGCCAUCAGAGAGGUGGAAGCCCACUUCGAGCCUGCCGCU
GAACCUGUGUGUGAACUGCCCUGUCUGAACGCUAGAAGAUACGGCCCUGA
GUGCGACGUGGGCAACCUGGAAACAAAUGGCGGCAGCACCAGCGACGACG
AGAUCUCUGAUGCCACCGACAGCGACGAUACACUGGCCAGCCACAGCGAU
ACAGAAGGCGGACCAUCUCCUGCCGGAAGAGAGAAUCCUGAGUCUGCCUC
UGGCGGAGCUAUCGCCGCUAGACUGGAAUGCGAGUUCGGCACCUUCGACU
GGACAAGCGAGGAAGGCUCUCAGCCUUGGCUGUCUGCUGUGGUGGCCGAU
ACAAGCAGCGCCGAAAGAUCUGGACUUCCUGCUCCUGGCGCCUGCAGAGC
UACAGAAGCUCCUGAAAGAGAGGACGGCUGCAGAAAGAUGCGGUUCCCUG
CCGCCUGUCCUUAUCCUUGCGGCCACACAUUUCUGCGGCCCUGA

[0903] Hence, preferably the RNA construct comprises a sequence substantially as set out in SEQ ID No: 452 or a fragment or variant thereof.

[0904] In another embodiment, the inhibitor of an innate signalling pathway is MERS CoV M protein (NCBI Reference Sequence: AGV08396.1; UniProtKB—T2BB40 (T2BB40_MERS)), or an orthologue thereof. One embodiment of the MERS CoV M is represented herein as SEQ ID No: 452, as follows:

[SEQ ID No: 452]
MSNMTQLTEAQIIAIIKDWNFAWSLIFLLITIVLQYGYPSRSMTVYVFKM
FVLWLLWPSSMALSIFSAIYPIDLASQIISGIVAAVSAMMWISYFVQSIR
LFMRTGSWWSFNPETNCLLNVPFGGTTVVRPLVEDSTSVTAVVTNGHLKM
AGMHFGACDYDRLPNEVTVAKPNVLIALKMVKRQSYGTNSGVAIYHRYKA
GNYRSPPITADIELALLR

[0905] Therefore, preferably the RNA construct comprises a nucleotide sequence which encodes an amino acid sequence substantially as set out in SEQ ID No: 452, or a variant or fragment thereof.

[0906] In one embodiment, the MERS CoV M polypeptide is encoded by the DNA nucleotide sequence of SEQ ID No: 453, as follows:

[SEQ ID No: 453]
ATGTCTAATATGACGCAACTCACTGAGGCGCAGATTATTGCCATTATTAA
AGACTGGAACTTTGCATGGTCCCTGATCTTTCTCTTAATTACTATCGTAC
TACAGTATGGATACCCATCCCGTAGTATGACTGTCTATGTCTTTAAAATG
TTTGTTTTATGGCTCCTATGGCCATCTTCCATGGCGCTATCAATATTTAG
CGCCATTTATCCAATTGATCTAGCTTCCCAGATAATCTCTGGCATTGTAG
CAGCTGTTTCAGCTATGATGTGGATTTCCTACTTTGTGCAGAGTATCCGG
CTGTTTATGAGAACTGGATCATGGTGGTCATTCAATCCTGAGACTAATTG
CCTTTTGAACGTTCCATTTGGTGGTACAACTGTCGTACGTCCACTCGTAG
AGGACTCCACCAGTGTAACTGCTGTTGTAACCAATGGCCACCTCAAAATG
GCTGGCATGCATTTCGGTGCTTGTGACTACGACAGACTTCCTAATGAAGT
CACCGTGGCCAAACCCAATGTGCTGATTGCTTTAAAAATGGTGAAGCGGC
AAAGCTACGGAACTAATTCCGGCGTTGCCATTTACCATAGATATAAGGCA
GGTAATTACAGGAGTCCGCCTATTACGGCGGATATTGAACTTGCATTGCT
TCGA

[0907] Accordingly, preferably the MERS CoV M polypeptide is encoded by the DNA nucleotide sequence substantially as set out in SEQ ID NO: 453, or a variant or fragment thereof.

[0908] Thus, the RNA construct may comprise an RNA nucleotide sequence of SEQ ID No: 454, as follows:

[SEQ ID No: 454]
AUGUCUAAUAUGACGCAACUCACUGAGGCGCAGAUUAUUGCCAUUAUUAA
AGACUGGAACUUUGCAUGGUCCCUGAUCUUUCUCUUAAUUACUAUCGUAC
UACAGUAUGGAUACCCAUCCCGUAGUAUGACUGUCUAUGUCUUUAAAAUG
UUUGUUUUAUGGCUCCUAUGGCCAUCUUCCAUGGCGCUAUCAAUAUUUAG
CGCCAUUUAUCCAAUUGAUCUAGCUUCCCAGAUAAUCUCUGGCAUUGUAG
CAGCUGUUUCAGCUAUGAUGUGGAUUUCCUACUUUGUGCAGAGUAUCCGG
CUGUUUAUGAGAACUGGAUCAUGGUGGUCAUUCAAUCCUGAGACUAAUUG
CCUUUUGAACGUUCCAUUUGGUGGUACAACUGUCGUACGUCCACUCGUAG
AGGACUCCACCAGUGUAACUGCUGUUGUAACCAAUGGCCACCUCAAAAUG
GCUGGCAUGCAUUUCGGUGCUUGUGACUACGACAGACUUCCUAAUGAAGU
CACCGUGGCCAAACCCAAUGUGCUGAUUGCUUUAAAAAUGGUGAAGCGGC
AAAGCUACGGAACUAAUUCCGGCGUUGCCAUUUACCAUAGAUAUAAGGCA
GGUAAUUACAGGAGUCCGCCUAUUACGGCGGAUAUUGAACUUGCAUUGCU
UCGA

[0909] Therefore, preferably the RNA construct comprises an RNA nucleotide sequence substantially as set out in SEQ ID No: 454, or a variant or fragment thereof.

[0910] The inventors then subjected the protein sequence of SEQ ID No: 452 to codon optimisation for human expression, and one embodiment of the codon optimised nucleic acid (DNA) sequence that includes that includes a start (ATG) and a stop (TGA) codon is provided herein as SEQ ID No:455, as follows:

[SEQ ID No: 455]
ATGAGCAACATGACCCAGCTGACAGAGGCCCAGATCATTGCCATCATCAA
GGACTGGAACTTCGCTTGGAGCCTGATCTTCCTGCTGATCACCATCGTGC
TGCAGTACGGCTACCCCAGCAGATCCATGACCGTGTACGTGTTCAAGATG
TTCGTCCTGTGGCTGCTGTGGCCCAGCTCTATGGCCCTGAGCATCTTCAG
CGCCATCTATCCCATCGACCTGGCCAGCCAGATCATCTCTGGAATCGTGG
CCGCCGTGTCCGCCATGATGTGGATCAGCTACTTCGTGCAGAGCATCCGG
CTGTTCATGAGAACCGGCAGCTGGTGGTCCTTCAATCCCGAGACAAACTG
CCTGCTGAACGTGCCCTTTGGCGGCACTACAGTCGTCAGACCCCTGGTGG
AAGATAGCACCTCTGTGACCGCCGTGGTCACCAATGGCCACCTGAAAATG
GCCGGCATGCACTTCGGCGCCTGCGACTATGACAGACTGCCCAACGAAGT
GACCGTGGCCAAGCCTAATGTGCTGATCGCCCTGAAGATGGTCAAGCGGC
AGAGCTACGGCACCAATTCTGGCGTGGCCATCTACCACAGATACAAGGCC
GGCAACTACAGAAGCCCTCCTATCACCGCCGACATCGAGCTGGCTCTGCT
GAGATGA

[0911] Hence, preferably the RNA construct is encoded by a DNA sequence substantially as set out in SEQ ID No: 455, or a fragment or variant thereof.

[0912] In an embodiment, the RNA sequence corresponding to the codon optimised DNA sequence of SEQ ID No: 455 that includes a start (AUG) and a stop (UGA) codon is provided herein as SEQ ID No: 456, as follows:

[SEQ ID No: 456]
AUGAGCAACAUGACCCAGCUGACAGAGGCCCAGAUCAUUGCCAUCAUCAA
GGACUGGAACUUCGCUUGGAGCCUGAUCUUCCUGCUGAUCACCAUCGUGC
UGCAGUACGGCUACCCCAGCAGAUCCAUGACCGUGUACGUGUUCAAGAUG
UUCGUCCUGUGGCUGCUGUGGCCCAGCUCUAUGGCCCUGAGCAUCUUCAG
CGCCAUCUAUCCCAUCGACCUGGCCAGCCAGAUCAUCUCUGGAAUCGUGG
CCGCCGUGUCCGCCAUGAUGUGGAUCAGCUACUUCGUGCAGAGCAUCCGG
CUGUUCAUGAGAACCGGCAGCUGGUGGUCCUUCAAUCCCGAGACAAACUG
CCUGCUGAACGUGCCCUUUGGCGGCACUACAGUCGUCAGACCCCUGGUGG
AAGAUAGCACCUCUGUGACCGCCGUGGUCACCAAUGGCCACCUGAAAAUG
GCCGGCAUGCACUUCGGCGCCUGCGACUAUGACAGACUGCCCAACGAAGU
GACCGUGGCCAAGCCUAAUGUGCUGAUCGCCCUGAAGAUGGUCAAGCGGC
AGAGCUACGGCACCAAUUCUGGCGUGGCCAUCUACCACAGAUACAAGGCC
GGCAACUACAGAAGCCCUCCUAUCACCGCCGACAUCGAGCUGGCUCUGCU
GAGAUGA

[0913] Hence, preferably the RNA construct comprises a sequence substantially as set out in SEQ ID No:456, or a fragment or variant thereof.

[0914] The at least one innate inhibitor protein (IIP) may not be selected from a group of IIPs consisting of: ORF4a (NS4a) of any coronavirus, ORF3b of any coronavirus, or the nucleocapsid proteins of mouse hepatitis virus and SARS (coronavirus); and orthologues thereof.

[0915] The at least one innate inhibitor protein (IIP) may not be selected from a group of IIPs consisting of: HSV-2 Us1; HSV-1 Us1; HSV-1Us11; ORF V20.0L; BVDV Npro; Langat NS5; Influenza NS1; PIV-5 V; SARS-CoV-2 ORF3b; and MERS-CoV ORF4a.

[0916] The RNA construct comprises a nucleotide sequence which encodes the at least one therapeutic biomolecule. This is referred to as the gene of interest (GOI) in FIG. 1.

[0917] The at least one therapeutic biomolecule may comprise a therapeutic protein. The skilled person would understand that therapeutic protein relates to any protein that has therapeutic application, preferably in human. Exemplary therapeutic biomolecules that can be encoded by the RNA molecule include proteins or peptides derived from pathogens, such as bacteria, viruses, fungi, protozoa/or parasites. The protein or peptide may be an antigen, and therefore one which may stimulate or trigger and immune response in the host. Hence, in the embodiment in which the at least one therapeutic biomolecule is an antigen, the RNA construct of the first aspect may be regarded as a vaccine.

[0918] The protein or peptide derived from a virus may be a viral antigen. The viral antigen may be derived from a virus selected from the group consisting of: Orthomyxoviruses; Paramyxoviridae viruses; Metapneumovirus and Morbilliviruses; Pneumoviruses; Paramyxoviruses; Poxviridae; Metapneumoviruses; Morbilliviruses; Picornaviruses; Enteroviruseses; Bunyaviruses; Phlebovirus; Nairovirus; Heparnaviruses; Togaviruses; Alphavirus; Arterivirus; Flaviviruses; Pestiviruses; Hepadnaviruses; Rhabdoviruses; Caliciviridae; Coronaviruses; Retroviruses; Reoviruses; Parvoviruses; Delta hepatitis virus (HDV); Hepatitis E virus (HEV); Human Herpesviruses and Papovaviruses.

[0919] The Orthomyxoviruses may be Influenza A, B and C. The Paramyxoviridae virus may be Pneumoviruses (RSV), Paramyxoviruses (PIV). The Metapneumovirus may be Morbilliviruses (e.g., measles). The Pneumovirus may be Respiratory syncytial virus (RSV), Bovine respiratory syncytial virus, Pneumonia virus of mice, or Turkey rhinotracheitis virus. The Paramyxovirus may be Parainkuenza virus types 1-4 (PIV), Mumps, Sendai viruses, Simian virus 5, Bovine parainkuenza virus, Nipahvirus, Henipavirus or Newcastle disease virus. The Poxviridae may be Variola vera, for example Variola major and Variola minor. The Metapneumovirus may be human metapneumovirus (hMPV) or avian metapneumoviruses (aMPV). The Morbillivirus may be measles. The Picornaviruses may be Enteroviruses, Rhinoviruses, Heparnavirus, Parechovirus, Cardioviruses and Aphthoviruses. The Enteroviruses may be Poliovirus types 1, 2 or 3, Coxsackie A virus types 1 to 22 and 24, Coxsackie B virus types 1 to 6, Echovirus (ECHO) virus) types 1 to 9, 11 to 27 and 29 to 34 or Enterovirus 68 to 71. The Bunyavirus may be California encephalitis virus. The Phlebovirus may be Rift Valley Fever virus. The Nairovirus may be Crimean-Congo hemorrhagic fever virus. The Heparnaviruses may be Hepatitis A virus (HAV). The Togaviruses may be Rubivirus. The Flavivirus may be Tick-borne encephalitis (TBE) virus, Dengue (types 1, 2, 3 or 4) virus, Yellow Fever virus, Japanese encephalitis virus, Kyasanur Forest Virus, West Nile encephalitis virus, St. Louis encephalitis virus, Russian spring-summer encephalitis virus or Powassan encephalitis virus. The Pestivirus may be Bovine viral diarrhea (BVDV), Classical swine fever (CSFV) or Border disease (BDV). The Hepadnavirus may be Hepatitis B virus or Hepatitis C virus. The Rhabdovirus may be Lyssavirus (Rabies virus) or Vesiculovirus (VSV). The Caliciviridae may be Norwalk virus, or Norwalk-like Viruses, such as Hawaii Virus and Snow Mountain Virus. The Coronavirus may be SARS CoV-1, SARS-CoV-2, MERS, Human respiratory coronavirus, Avian infectious bronchitis (IBV), Mouse hepatitis virus (MHV), or Porcine transmissible gastroenteritis virus (TGEV). The Retrovirus may be Oncovirus, a Lentivirus or a Spumavirus. The Reovirus may be an Orthoreo virus, a Rotavirus, an Orbivirus, or a Coltivirus. The Parvovirus may be Parvovirus B 19. The Human Herpesvirus may be Herpes Simplex Viruses (HSV), Varicella-zoster virus (VZV), Epstein-Barr virus (EBV), Cytomegalovirus (CMV), Human Herpesvirus 6 (HHV6), Human Herpesvirus 7 (HHV7), or Human Herpesvirus 8 (HHV8). The Papovavirus may be Papilloma viruses, Polyomaviruses, Adenoviruess or Arenaviruses.

[0920] The protein or peptide derived from bacteria may be a bacterial antigen.

[0921] The bacterial antigen may derived from a bacterium selected from the group consisting of: Neisseria meningitides, Streptococcus pneumoniae, Streptococcus pyogenes, Moraxella catarrhalis, Bordetella pertussis, Burkholderia sp. (e.g., Burkholderia mallei, Burkholderia pseudomallei and Burkholderia cepacia), Staphylococcus aureus, Haemophilus influenzae, Clostridium tetani (Tetanus), Clostridium perfringens, Clostridium botulinums, Cornynebacterium diphtheriae (Diphtheria), Pseudomonas aeruginosa, Legionella pneumophila, Coxiella burnetii, Brucella sp. (e.g., B. abortus, B. canis, B. melitensis, B. neotomae, B. ovis, B. suis and B. pinnipediae, Francisella sp. (e.g., F. novicida, F. philomiragia and F. tularensis), Streptococcus agalactiae, Neiserria gonorrhoeae, Chlamydia trachomatis, Treponema pallidum (Syphilis), Haemophilus ducreyi, Enterococcusfaecalis, Enterococcus faecium, Helicobacter pylori, Staphylococcus saprophyticus, Yersinia enter ocolitica, E. coli, Bacillus anthracis (anthrax), Yersinia pestis (plague), Mycobacterium tuberculosis, Rickettsia, Listeria, Chlamydia pneumoniae, Vibrio cholerae, Salmonella typhi (typhoid fever), Borrelia burgdorfer, Porphyromonas s and Klebsiella sp.

[0922] The protein or peptide derived from a fungus may be a fungal antigen.

[0923] The fungal antigen may be derived from a fungus selected from the group consisting of Dermatophytres, including: Epidermophyton koccusum, Microsporum audouini, Microsporum canis, Microsporum distortum, Microsporum equinum, Microsporum gypsum, Microsporum nanum, Trichophyton concentricum, Trichophyton equinum, Trichophyton gallinae, Trichophyton gypseum, Trichophyton megnini, Trichophyton mentagrophytes, Trichophyton quinckeanum, Trichophyton rubrum, Trichophyton schoenleini, Trichophyton tonsurans, Trichophyton verrucosum, T verrucosum var. album, var. discoides, var. ochraceum, Trichophyton violaceum, and/or Trichophyton faviforme; or from Aspergillus fumigatus, Aspergillus kavus, Aspergillus niger, Aspergillus nidulans, Aspergillus terreus, Aspergillus sydowii, Aspergillus kavatus, Aspergillus glaucus, Blastoschizomyces capitatus, Candida albicans, Candida enolase, Candida tropicalis, Candida glabrata, Candida krusei, Candida parapsilosis, Candida stellatoidea, Candida kusei, Candida parakwsei, Candida lusitaniae, Candida pseudotropicalis, Candida guilliermondi, Cladosporium carrionii, Coccidioides immitis, Blastomyces dermatidis, Cryptococcus neoformans, Geotrichum clavatum, Histoplasma capsulatum, Klebsiella pneumoniae, Microsporidia, Encephalitozoon spp., Septata intestinalis and Enterocytozoon bieneusi; Brachiola spp, Microsporidium spp., Nosema spp., Pleistophora spp., Trachipleistophora spp., Vittaforma spp Paracoccidioides brasiliensis, Pneumocystis carinii, Pythiumn insidiosum, Pityrosporum ovale, Sacharomyces cerevisiae, Saccharomyces boulardii, Saccharomyces pombe, Scedosporium apiosperum, Sporothrix schenckii, Trichosporon beigelii, Toxoplasma gondii, Penicillium marneffei, Malassezia spp., Fonsecaea spp., Wangiella spp., Sporothrix spp., Basidiobolus spp., Conidiobolus spp., Rhizopus spp, Mucor spp, Absidia spp, Mortierella spp, Cunninghamella spp, Saksenaea spp., Alternaria spp, Curvularia spp, Helminthosporium spp, Fusarium spp, Aspergillus spp, Penicillium spp, Monolinia spp, Rhizoctonia spp, Paecilomyces spp, Pithomyces spp, and Cladosporium spp. The protein or peptide derived from a protozoan may be a protozoan antigen.

[0924] The protozoan antigen may be derived from a protozoan selected from the group consisting of: Entamoeba histolytica, Giardia lambli, Cryptosporidium parvum, Cyclospora cayatanensis and Toxoplasma.

[0925] The therapeutic biomolecule may be a protein or peptide derived from a plant. Preferably, the protein or peptide is a plant antigen. For example, the plant antigen may be derived from Ricinus communis.

[0926] In another embodiment, the therapeutic biomolecule may be an immunogen or an antigen. Preferably, the immunogen or an antigen is a tumour immunogen or antigen, or cancer immunogen or antigen. The tumour immunogens and antigens may be peptide-containing tumour antigens, such as a polypeptide tumour antigen or glycoprotein tumour antigens.

[0927] The tumour antigens may be (a) full length molecules associated with cancer cells, (b) homologs and modified forms of the same, including molecules with deleted, added and/or substituted portions, and (c) fragments of the same.

[0928] Suitable tumour immunogens include: class I-restricted antigens recognized by CD 8+ lymphocytes or class II-restricted antigens recognized by CD4+ lymphocytes.

[0929] The tumour antigen may be an antigen that is associated with a cancer selected from the group consisting of: a testis cancer, melanoma, lung cancer, head and neck cancer, NSCLC, breast cancer, gastrointestinal cancer, bladder cancer, colorectal cancer, pancreatic cancer, lymphoma, leukaemia, renal cancer, hepatoma, ovarian cancer, gastric cancer and prostate cancer.

[0930] The tumour antigen may be selected from:
[0931] (a) cancer-testis antigens, such as NY-ESO-I, SSX2, SCP-1, as well as RAGE, BAGE, GAGE and MAGE family polypeptides, for example, GAGE-I, GAGE-2, MAGE-I, MAGE-2, MAGE-3, MAGE-4, MAGE-5, MAGE-6, and MAGE-12 (which can be used, for example, to address melanoma, lung, head and neck, NSCLC, breast, gastrointestinal, and bladder tumours);
[0932] (b) mutated antigens, for example, p53 (associated with various solid tumours, e.g., colorectal, lung, head and neck cancer), p21/Ras (associated with, e.g., melanoma, pancreatic cancer and colorectal cancer), CDK4 (associated with, e.g., melanoma), MUM-1 (associated with, e.g., melanoma), caspase-8 (associated with, e.g., head and neck cancer), CIA 0205 (associated with, e.g., bladder cancer), HLA-A2-R1701, beta catenin (associated with, e.g., melanoma), TCR (associated with, e.g., T-cell non-Hodgkins lymphoma), BCR-abl (associated with, e.g., chronic myelogenous leukemia), triosephosphate isomerase, KIA 0205, CDC-27, and LDLR-FUT;
[0933] (c) over-expressed antigens, for example, Galectin 4 (associated with, e.g., colorectal cancer), Galectin 9 (associated with, e.g., Hodgkin's disease), proteinase 3 (associated with, e.g., chronic myelogenous leukemia), WT 1 (associated with, e.g., various leukaemias), carbonic anhydrase (associated with, e.g., renal cancer), aldolase A (associated with, e.g., lung cancer), PRAME (associated with, e.g., melanoma), HER-2/neu (associated with, e.g., breast, colon, lung and ovarian cancer), alpha-fetoprotein (associated with, e.g., hepatoma), KSA (associated with, e.g., colorectal cancer), gastrin (associated with, e.g., pancreatic and gastric cancer), telomerase catalytic protein, MUC-I (associated with, e.g., breast and ovarian cancer), G-250 (associated with, e.g., renal cell carcinoma), p53 (associated with, e.g., breast, colon cancer), and carcinoembryonic antigen (associated with, e.g., breast cancer, lung cancer, and cancers of the gastrointestinal tract such as colorectal cancer);
[0934] (d) shared antigens, for example, melanoma-melanocyte differentiation antigens, such as MART-1/Melan A, gplOO, MClR, melanocyte-stimulating hormone receptor, tyrosinase, tyrosinase related protein-1/TRPl and tyrosinase related protein-2/TRP2 (associated with, e.g., melanoma);
[0935] (e) prostate-associated antigens, such as PAP, PSA, PSMA, PSH-Pl, PSM-Pl, PSM-P2, associated with e.g., prostate cancer; and/or
[0936] (f) immunoglobulin idiotypes (associated with myeloma and B cell lymphomas, for example).

[0937] The therapeutic biomolecule may be a eukaryotic protein or peptide. In one embodiment, the eukaryotic protein or peptide is a mammalian protein or peptide. The mammalian protein or peptide may be selected from the group consisting of: an enzyme; an enzyme inhibitor; a hormone; an immune system protein; a receptor; a binding protein; a transcription factor; translation factor; tumour growth suppressing protein; a structural protein; and a blood protein.

[0938] The immune system protein may be an antibody or antigen binding fragment thereof. Accordingly, the therapeutic biomolecule may be an antibody or antigen binding fragment thereof. The antigen binding fragment may comprise an individual heavy or light chain, or a fragment thereof, such as VL, VH and Fd; a monovalent fragment, such as Fv, Fab, and Fab′; a bivalent fragment, such as F(ab′)₂; a single chain Fv (scFv); one or more complementarity determining region (CDR); or a Fc fragment.

[0939] The enzyme may be selected from the group consisting of: chymosin; gastric lipase; tissue plasminogen activator; streptokinase; a cholesterol biosynthetic or degradative steriodogenic enzyme; kinases; phosphodiesterases; methylases; de-methylases; dehydrogenases; cellulases; proteases; lipases; phospholipases; aromatases; cytochromes; adenylate or guanylaste cyclases and neuramidases.

[0940] The enzyme inhibitor may be tissue inhibitor of metalloproteinase (TIMP). The hormone may be growth hormone.

[0941] The immune system protein may be selected from the group consisting of: a cytokine; a chemokine; a lymphokine; erythropoietin; an integrin; addressin; selectin; homing receptors; T cell receptors and immunoglobulins.

[0942] The cytokine may be an interleukin, for example IL-2, IL-4 and/or IL-6, colony stimulating factor (CSF), granulocyte colony stimulating factor (G-CSF), granulocyte-macrophage colony stimulating factor (GM-CSF) or tumour necrosis factor (TNF).

[0943] The chemokine may be a macrophage inflammatory protein-2 and/or a plasminogen activator.

[0944] The lymphokine may be an interferon.

[0945] The immunoglobulin may be a natural, modified or chimeric immunoglobulin or a fragment thereof. Preferably, the immunoglobulin is a chimeric immunoglobulin having dual activity such as antibody enzyme or antibody-toxin chimera.

[0946] The hormone may be selected from the group consisting of: insulin, thyroid hormone, catecholamines, gonadotrophines, trophic hormones, prolactin, oxytocin, dopamine, bovine somatotropin, leptins; growth hormones (e.g., human growth hormone), growth factors (e.g., epidermal growth factor, nerve growth factor, insulin-like growth factor and the like).

[0947] The receptor may be a steroid hormone receptor or a peptide receptor. Preferably, the receptor is a growth factor receptor.

[0948] The binding protein may be a growth factor binding protein.

[0949] The tumour growth suppressing protein may be a protein that inhibits angiogenesis.

[0950] The structural protein may be selected from the group consisting of: collagen; fibroin; fibrinogen; elastin; tubulin; actin; and myosin.

[0951] The blood protein may be selected from the group consisting of thrombin; serum albumin; Factor VII; Factor VIII; insulin; Factor IX; Factor X; tissue plasminogen activator; protein C; von Willebrand factor; antithrombin III; glucocerebrosidase; erythropoietin granulocyte colony stimulating factor (GCSF) or modified Factor VIII; and anticoagulants.

[0952] In one preferred embodiment, the therapeutic biomolecule is a cytokine which is capable of regulating lymphoid homeostasis, preferably a cytokine which is involved in and preferably induces or enhances development, priming, expansion, differentiation and/or survival of T cells. Thus, preferably, the cytokine is an interleukin. Most preferably, IL-2, IL-7, IL-12, IL-15, or IL-21.

[0953] The therapeutic biomolecule may be protein that is capable of enhancing reprogramming of somatic cells to cells having stem cell characteristics. The protein that is capable of enhancing reprogramming of somatic cells to cells having stem cell characteristics may be selected from the group consisting of: OCT4, SOX2, NANOG, LIN28, p53, ART-4, BAGE, ss-catenin/m, Bcr-abL CAMEL, CAP-1, CASP-8, CDC27/m, CD 4/m, CEA, CLAUDIN-12, c-MYC, CT, Cyp-B, DAM, ELF2M, ETV6-AML1, G250, GAGE, GnT-V, GaplOO, HAGE, HER-2/neu, HPV-E7, HPV-E6, HAST-2, hTERT (or hTRT), LAGE, LDLR/FUT, MAGE-A, MAGE-B, MAGE-C, MART-1/Melan-A, MC1R, Myosin/m, MUC1, MUM-1, -2, -3, NA88-A, NF1, NY-ESO-1, NY-BR-1, p190 minor BCR-abL, Plac-1, Pml/RARa, PRAME, proteinase 3, PSA, PSM, RAGE, RU1 or RU2, SAGE, SART-1 or SART-3, SCGB3A2, SCP1, SCP2, SCP3, SSX, SURVIVIN, TEL/AML1, TPI/m, TRP-1, TRP-2, TRP-2/INT2, TPTE and WT, preferably WT-1.

[0954] Preferably, MAGE-A is selected from the group consisting of: MAGE-A 1, MAGE-A2, MAGE-A3, MAGE-A4, MAGE-A5, MAGE-A6, MAGE-A7, MAGE-A8, MAGE-A9, MAGE-A 10, MAGE-A 11, or MAGE-A 12. Preferably, the protein that is capable of enhancing reprogramming of somatic cells to cells having stem cell characteristics is OCT4, SOX2, LF4; c-MYC; NANOG; LIN28.

[0955] The therapeutic biomolecule may be a biomolecule that is utilised for the modification of cells ex vivo for cell-therapy indications. Thus, preferably the therapeutic biomolecule may be selected from the group consisting of an immunoglobulin, a T-cell receptor and NK receptor.

[0956] The therapeutic biomolecule may be an RNA molecule that is capable of regulating expression of endogenous host genes, for example an interfering RNA, such as small RNA, siRNA or microRNA.

[0957] The sequence encoding the at least one viral innate inhibitor protein (IIP) may be disposed anywhere within the RNA construct of the first aspect, such that the sequence encoding the therapeutic biomolecule (i.e. the GOI in FIG. 1) may be disposed either 5′ or 3′ to the sequence encoding the at least one IIP.

[0958] For example, in one embodiment, the sequence encoding the therapeutic biomolecule is preferably disposed 5′ to the sequence encoding the at least one innate modulatory protein. See for example, the saRNA embodiments 2a, 3a, 4a, and the mRNA embodiments 6a and 7a shown in FIG. 1.

[0959] However, in another embodiment, the sequence encoding the therapeutic biomolecule is preferably disposed 3′ to the sequence encoding the at least one innate modulatory protein. See for example, the saRNA embodiments 2b, 3b, 4b, and the mRNA embodiments 6b and 7b shown in FIG. 1.

[0960] Preferably, the RNA construct according to the first aspect comprises at least one promotor, which may be either genomic or subgenomic. Preferably, however, the promoter is a subgenomic promoter, as is shown in FIG. 1 (embodiments 1-4b).

[0961] Preferably, therefore, saRNA constructs of the invention comprise a promoter. The skilled person would understand that the subgenomic promotor relates to a promoter that is operably linked to the sequences encoding the at least one therapeutic biomolecule and the at least one innate inhibitor protein, such that it enables the transcription of the nucleotide sequence encoding the therapeutic biomolecule and the at least one innate modulatory protein.

[0962] Preferably, the subgenomic promoter is 26S, which is provided herein as SEQ ID No: 67, as follows:

[SEQ ID No: 67]
GGGCCCCTATAACTCTCTACGGCTAACCTGAATGGACTACGACAT

[0963] Accordingly, preferably the promoter (which is preferably a subgenomic promoter) is as substantially as set out in SEQ ID NO: 67, or a variant or fragment thereof.

[0964] In one embodiment, the same promotor is operably linked to the sequence encoding the at least therapeutic biomolecule and the sequence encoding the at least one innate modulatory protein.

[0965] The inventor's designs, wherein both the therapeutic biomolecule (i.e. GOI) and IIP are encoded by a single strand of RNA, advantageously enables the use of much smaller doses of RNA, because it ensures that the protein is being expressed in the same cell that is sensing the RNA, and can also be replicated, therefore having the additional aspect of expression and amplification of the innate modulatory component.

[0966] Thus, in one embodiment of the RNA construct, the promoter is disposed 5′ of the sequence encoding the at least one therapeutic biomolecule and the sequence encoding the at least one innate inhibitor protein, such that the promoter is operably linked to both sequences, thereby driving expression of both.

[0967] In another embodiment, however, a first promotor is operably linked to the sequence encoding the at least one therapeutic biomolecule, and a second promotor is operably linked the sequence encoding the at least one innate inhibitor protein. This is referred to as a double genomic construct. Preferably, the first and/or second promoter is genomic or subgenomic. Preferably, both promoters are subgenomic promoters, such as 26S.

[0968] The RNA construct may encode at least two, three, four or five IIPs. In embodiments in which there is more than one sequence encoding an innate modulatory protein, a single promotor may be operably linked to all sequences encoding an innate modulatory protein.

[0969] Alternatively, a promotor may be linked to each of the sequences encoding an innate modulatory protein, such that each innate modulatory protein is operably linked to a separate promoter. In this embodiment, the separate promoters may comprise the same promotor sequence or different promoter sequences. In another embodiment, different promotors are operably linked to each sequence encoding an innate modulatory protein.

[0970] The RNA construct may further comprise a linker sequence disposed between the sequence encoding the at least one therapeutic biomolecule and the sequence encoding the at least one innate modulatory protein. This linker sequence is such that it allows the production of the IIP and the production of the therapeutic molecule from the single promoter. In one embodiment, the linker sequence encodes a peptide linker that is configured to be digested or cleaved following translation, to thereby separate the at least one therapeutic biomolecule and the at least one innate modulatory protein in the host cell. As such, the linker sequence is preferably a cleavable peptide, which may form a cleavage site, for example a 2A peptide (Furler S, Paterna J-C, Weibel M and Bueler H Recombinant AAV vectors containing the foot and mouth disease virus 2A sequence confer efficient bicistronic gene expression in cultured cells and rat substantia nigra neurons Gene Ther. 2001, vol. 8, PP: 864-873).

[0971] Preferably, the linker sequence encoding the 2A peptide sequence connects the two coding sequence together. This enables the RNA construct to overcome the size restrictions that may occur with expression in various vectors and enables expression and translation of all of the peptides encoded by the RNA construct of the first aspect to occur under control of a single promoter, as a single protein. Thus, following the translation of the single protein comprising the sequences of the IIP, the 2A peptide, and the therapeutic biomolecule, cleavage occurs in the viral 2A peptide sequence at the terminal glycine-proline link, thereby liberating two polypeptides.

[0972] The 2A spacer sequence may be any known variant, which includes those sequences referred to as E2A, F2A, P2A and T2A, as disclosed in Wang Y et al. Scientific Reports 2015, 5, i.e. suitable 2A peptides include the porcine teschovirus-1 2A (P2A)—ATNFSLLKQAGDVEENPGP (SEQ ID No: 68), Thosea asigna virus 2A (T2A)—QCTNYALLKLAGDVESNPGP (SEQ ID No: 69), equine rhinitis A virus 2A (E2A), and Foot and mouth disease virus 2A (F2A) VKQTLNFDLLKLAGDVESNPGP (SEQ ID No: 70). Preferably, the 2A peptide is Thosea asigna virus 2A (T2A).

[0973] In another embodiment, the cleavable peptide is a self-cleaving peptide. In an embodiment, the linker comprises a viral 2A peptide spacer and further comprises a furin cleavage site. Preferably, the self-cleaving peptide is a furin/2A peptide. Insertion of an upstream furin cleavage site allows the removal of 2A residues that would otherwise remain attached to the upstream protein.

[0974] The furin sequence may be disposed 3′ or 5′ of the 2A sequence. Preferably, however, the furin sequence is disposed 5′ of the 2A sequence, and preferably with a GSG spacer disposed between the furin and 2A sequence.

[0975] The skilled person would appreciate that furin is a ubiquitous calcium-dependent proprotein convertase located in the secretory pathway (mainly in the golgi and trans-golgi network) that cleaves precursor proteins at a specific recognition sequence—canonically R-X-R/K/X-R (SEQ ID No: 71), and cleaving the proprotein after the final R. Thus, in one embodiment the furin sequence is R-X-R/K/X-R. However, preferably, the furin sequence is the optimised sequence RRRRRR (SEQ ID No: 72) a GSG sequence. Preferably, the GSG spacer is disposed 3′ of the furin sequence and 5′ of the 2A sequence.

[0976] Thus, preferably, the spacer sequence is the furin/T2A, as provided by NCBI Reference Sequence: GenBank: AAC97195.1, and provided herein as SEQ ID No: 73, as follows:

[SEQ ID No: 73]
RRRRRRGSGEGRGSLLTCGDVEENPGP

[0977] Hence, preferably the spacer sequence comprises an amino acid sequence substantially as set out in SEQ ID NO: 73, or a variant or fragment thereof.

[0978] FIG. 1 shows embodiments 2a, 2b and 6a, 6b in which the GOI and IIP are linked by a nucleotide sequence which encodes the Furin-T2a cleavage site. In one embodiment, shown as either 2a or 6a in FIG. 1, the F-T2a cleavage site separates a 5′ GOI and a 3′ IIP. In one embodiment, shown as either 2b or 6b in FIG. 1, the F-T2a cleavage site separates a 3′ GOI and a 5′ IIP.

[0979] In embodiments in which the RNA construct or replicon comprises more than one sequence encoding an innate modulatory protein, the construct may comprise linker sequences disposed between each sequence encoding an innate modulatory protein, or only between some IIPs.

[0980] In one embodiment, the sequence encoding the at least one therapeutic biomolecule and the sequence encoding the at least one innate modulatory protein may be separated by a stop codon followed by an internal ribosome entry site (IRES) sequence capable of initiating translation of the downstream sequence, whichever sequence that may be (i.e. GOI or IIP as shown in embodiments 3a, 3b, 7a or 7b in FIG. 1). Therefore, preferably the IRES sequence is disposed between the sequence encoding the at least one therapeutic biomolecule and the sequence encoding at least one innate modulatory protein. Where multiple sequences encoding at least one innate modulatory protein are used, linker sequences may include combinations of known cleavage sequences and/or IRES sequences. In one embodiment, shown as either 3a or 7a in FIG. 1, the IRES site separates a 5′ GOI and a 3′ IIP. In one embodiment, shown as either 3b or 7b in FIG. 1, the IRES site separates a 3′ GOI and a 5′ IIP.

[0981] In an embodiment, the IRES is a picornavirus IRES. Oher typical IRES sequences include those such as the IRES sequence of encephalomyocarditis virus (EMCV) or vascular endothelial growth factor and type 1 collagen-inducible protein (VCIP), and would be known to those skilled in the art.

[0982] In other embodiments, the IRES may be selected from a rhinovirus IRES, a hepatitis A virus IRES, a hepatitis C virus IRES, a poliovirus IRES, an enterovirus IRES, a cardiovirus IRES, an aphthovirus IRES, flavivirus IRES, a pestivirus IRES, a cripavirus IRES, a Rhopalosiphum padi virus IRES, or any suitable IRES. In particular, the IRES may be any IRES described by the “IRESite” which provides a database of experimentally verified IRES structures (http://www.iresite.org/), or as disclosed in “New Messenger RNA Research Communications” (ISBN: 1-60021-488-6).

[0983] In a preferred embodiment, the IRES is a foot-and-mouth disease virus (FMDV) IRES, which may be as set out in SEQ ID No:74, or a fragment or variant thereof, as follows:

[SEQ ID NO: 74]
AGCAGGTTTCCCCAACTGACACAAAACGTGCAACTTGAAACTCCGCCTGG
TCTTTCCAGGTCTAGAGGGGTAACACTTTGTACTGCGTTTGGCTCCACGC
TCGATCCACTGGCGAGTGTTAGTAACAGCACTGTTGCTTCGTAGCGGAGC
ATGACGGCCGTGGGAACTCCTCCTTGGTAACAAGGACCCACGGGGCCAAA
AGCCACGCCCACACGGGCCCGTCATGTGTGCAACCCCAGCACGGCGACTT
TACTGCGAAACCCACTTTAAAGTGACATTGAAACTGGTACCCACACACTG
GTGACAGGCTAAGGATGCCCTTCAGGTACCCCGAGGTAACACGCGACACT
CGGGATCTGAGAAGGGGACTGGGGCTTCTATAAAAGCGCTCGGTTTAAAA
AGCTTCTATGCCTGAATAGGTGACCGGAGGTCGGCACCTTTCCTTTGCAA
TTACTGACCAC

[0984] In another preferred embodiment, the IRES is an encephalomyocarditis virus (EMCV) IRES. The EMCV IRES may be as set out in SEQ ID No:75, or a fragment or variant thereof, as follows:

[SEQ ID NO: 75]
CGTTACTGGCCGAAGCCGCTTGGAATAAGGCCGGTGTGCGTTTGTCTATA
TGTTATTTTCCACCATATTGCCGTCTTTTGGCAATGTGAGGGCCCGGAAA
CCTGGCCCTGTCTTCTTGACGAGCATTCCTAGGGGTCTTTCCCCTCTCGC
CAAAGGAATGCAAGGTCTGTTGAATGTCGTGAAGGAAGCAGTTCCTCTGG
AAGCTTCTTGAAGACAAACAACGTCTGTAGCGACCCTTTGCAGGCAGCGG
AACCCCCCACCTGGCGACAGGTGCCTCTGCGGCCAAAAGCCACGTGTATA
AGATACACCTGCCAACAAGGGGCTGAAGGATGCCCAGAAGGTACCCCATT
GTATGGGATCTGATCTGGGGCCTCGGTGCACATGCTTTTCATGTGTTTAG
TCGAGGTTAAAAAACGTCTAGGCCCCCCGAACCACGGGGACGTGGTTTTC
CTTTGAAAAACACGATGATAATA

[0985] Therefore, preferably the IRES comprises a nucleotide sequence substantially as set out in SEQ ID No: 74 or 75, or a fragment or variant thereof.

[0986] Alternatively, instead of an IRES or a 2A linker, the linker sequence may comprise a sequence encoding a flexible linker, which allows for the expression of both the therapeutic biomolecule and IIP as a single polypeptide chain, but wherein the therapeutic biomolecule and IIP act as independent proteins. Hence, the proteins exert their effects in the same manner as if they were singly expressed.

[0987] The flexible linker sequence may be as disclosed by WO 2013/061076 A1 (Oxford Biomedica). The flexible linker sequence may be referred to herein as SEQ ID No:76, or a fragment or variant thereof, as follows:

[SEQ ID NO: 76]
GGAGGTGGCGGGTCCGGGGGCGGGGGTAGCGGTGGCGGGGGCTCC

[0988] Preferably, therefore, the flexible linker sequence comprises a nucleotide sequence substantially as set out in SEQ ID No: 76, or a fragment or variant thereof.

[0989] In one preferred embodiment, the flexible linker sequence comprises a nucleotide sequence encoding an amino acid sequence referred to herein as SEQ ID NO: 77, or a fragment or variant thereof, as set out below:

[SEQ ID NO: 77]
GGGGSGGGGSGGGGS

[0990] Preferably, therefore, the flexible linker sequence encodes an amino acid sequence substantially as set out in SEQ ID No: 77, or a fragment or variant thereof.

[0991] In yet another embodiment, the sequence encoding the at least one therapeutic biomolecule and the at least one innate inhibitor protein may be separated by a stop codon followed by a second subgenomic promotor sequence capable of initiating transcription of the downstream sequence. Examples of this embodiment are illustrated in FIG. 1, embodiments 4a and 4b.

[0992] The RNA construct (preferably when it is a saRNA construct) may encode at least one non-structural protein (NSP), disposed 5′ or 3′ of the sequence encoding the at least one therapeutic biomolecule and the at least one innate modulatory protein. Preferably, the sequence encoding the at least one NSP is disposed 5′ of the sequences encoding the therapeutic biomolecule and the at least one innate modulatory protein. Thus, preferably the sequence encoding the at least one NSP is disposed at the 5′ end of the RNA construct.

[0993] The at least one non-structural protein, which is encoded by the RNA construct, may be the RNA polymerase NSP4. The one or more non-structural protein preferably encodes a replicase. Preferably, the construct encodes NSP1, NSP2, NSP3 and NSP4. The skilled person would understand that NSP1 is the viral capping enzyme and membrane anchor of the replication complex (RC), while NSP2 is an RNA helicase and the protease responsible for the ns polyprotein processing. NSP3 interacts with several host proteins and may modulate protein poly- and mono-ADP-ribosylation, and NSP4 is the core viral RNA-dependent RNA polymerase.

[0994] In one embodiment, NSP1 is provided herein as SEQ ID No: 78, as follows:

[SEQ ID No: 78]
MEKVHVDIEEDSPFLRALQRSFPQFEVEAKQVTDNDHANARAFSHLASKLI
ETEVDPSDTILDIGSAPARRMYSKHKYHCICPMRCAEDPDRLYKYATKLKK
NCKEITDKELDKKMKELAAVMSDPDLETETMCLHDDESCRYEGQVAVYQDV
YAVDGPTSLYHQANKGVRVAYWIGFDTTPFMFKNLAGAYPSYSTNWADETV
LTARNIGLCSSDVMERSRRGMSILRKKYLKPSNNVLFSVGSTIYHEKRDLL
RSWHLPSVFHLRGKQNYTCRCETIVSCDGYVVKRIAISPGLYGKPSGYAAT
MHREGFFARWAKEYKEDQEDERPLGLRDRQLVMGCCWAFRRHKITSIYKRP
DTQTIIKVNSDFHSFVLPRIGSNTLEIGLRTRIRKMLEEHKEPSPLITAED
VQEAKCAADEAKEVREAEELRAALPPLAADVEEPTLEADVDLMLQEAGA

[0995] Accordingly, NSP1 preferably comprises an amino acid sequence as substantially as set out in SEQ ID No: 78, or a biologically active variant or fragment thereof.

[0996] In one embodiment, NSP1 is encoded by a nucleotide sequence a defined in SEQ ID No: 79, as follows:

[SEQ ID No: 79]
ATGGAGAAAGTTCACGTTGACATCGAGGAAGACAGCCCATTCCTCAGAGCT
TTGCAGCGGAGCTTCCCGCAGTTTGAGGTAGAAGCCAAGCAGGTCACTGAT
AATGACCATGCTAATGCCAGAGCGTTTTCGCATCTGGCTTCAAAACTGATC
GAAACGGAGGTGGACCCATCCGACACGATCCTTGACATTGGAAGTGCGCCC
GCCCGCAGAATGTATTCTAAGCACAAGTATCATTGTATCTGTCCGATGAGA
TGTGCGGAAGATCCGGACAGATTGTATAAGTATGCAACTAAGCTGAAGAAA
AACTGTAAGGAAATAACTGATAAGGAATTGGACAAGAAAATGAAGGAGCTG
GCCGCCGTCATGAGCGACCCTGACCTGGAAACTGAGACTATGTGCCTCCAC
GACGACGAGTCGTGTCGCTACGAAGGGCAAGTCGCTGTTTACCAGGATGTA
TACGCGGTTGACGGACCGACAAGTCTCTATCACCAAGCCAATAAGGGAGTT
AGAGTCGCCTACTGGATAGGCTTTGACACCACCCCTTTTATGTTTAAGAAC
TTGGCTGGAGCATATCCATCATACTCTACCAACTGGGCCGACGAAACCGTG
TTAACGGCTCGTAACATAGGCCTATGCAGCTCTGACGTTATGGAGCGGTCA
CGTAGAGGGATGTCCATTCTTAGAAAGAAGTATTTGAAACCATCCAACAAT
GTTCTATTCTCTGTTGGCTCGACCATCTACCACGAGAAGAGGGACTTACTG
AGGAGCTGGCACCTGCCGTCTGTATTTCACTTACGTGGCAAGCAAAATTAC
ACATGTCGGTGTGAGACTATAGTTAGTTGCGACGGGTACGTCGTTAAAAGA
ATAGCTATCAGTCCAGGCCTGTATGGGAAGCCTTCAGGCTATGCTGCTACG
ATGCACCGCGAGGGATTCTTGTGCTGCAAAGTGACAGACACATTGAACGGG
GAGAGGGTCTCTTTTCCCGTGTGCACGTATGTGCCAGCTACATTGTGTGAC
CAAATGACTGGCATACTGGCAACAGATGTCAGTGCGGACGACGCGCAAAAA
CTGCTGGTTGGGCTCAACCAGCGTATAGTCGTCAACGGTCGCACCCAGAGA
AACACCAATACCATGAAAAATTACCTTTTGCCCGTAGTGGCCCAGGCATTT
GCTAGGTGGGCAAAGGAATATAAGGAAGATCAAGAAGATGAAAGGCCACTA
GGACTACGAGATAGACAGTTAGTCATGGGGTGTTGTTGGGCTTTTAGAAGG
CACAAGATAACATCTATTTATAAGCGCCCGGATACCCAAACCATCATCAAA
GTGAACAGCGATTTCCACTCATTCGTGCTGCCCAGGATAGGCAGTAACACA
TTGGAGATCGGGCTGAGAACAAGAATCAGGAAAATGTTAGAGGAGCACAAG
GAGCCGTCACCTCTCATTACCGCCGAGGACGTACAAGAAGCTAAGTGCGCA
GCCGATGAGGCTAAGGAGGTGCGTGAAGCCGAGGAGTTGCGCGCAGCTCTA
CCACCTTTGGCAGCTGATGTTGAGGAGCCCACTCTGGAAGCCGATGTCGAC
TTGATGTTACAAGAGGCTGGGGCC

[0997] Accordingly, NSP1 is preferably encoded by a nucleotide sequence as substantially as set out in SEQ ID No: 79, or a variant or fragment thereof.

[0998] Accordingly, therefore, preferably the RNA construct comprises an RNA nucleotide sequence substantially as set out as SEQ ID No: 80, or a variant or fragment thereof.

[SEQ ID No: 80]
AUGGAGAAAGUUCACGUUGACAUCGAGGAAGACAGCCCAUUCCUCAGAGCUUUGCAGCGGAGCUUCCCGCAGUUUGAG
GUAGAAGCCAAGCAGGUCACUGAUAAUGACCAUGCUAAUGCCAGAGCGUUUUCGCAUCUGGCUUCAAAACUGAUCGAA
ACGGAGGUGGACCCAUCCGACACGAUCCUUGACAUUGGAAGUGCGCCCGCCCGCAGAAUGUAUUCUAAGCACAAGUAU
CAUUGUAUCUGUCCGAUGAGAUGUGCGGAAGAUCCGGACAGAUUGUAUAAGUAUGCAACUAAGCUGAAGAAAAACUGU
AAGGAAAUAACUGAUAAGGAAUUGGACAAGAAAAUGAAGGAGCUGGCCGCCGUCAUGAGCGACCCUGACCUGGAAACU
GAGACUAUGUGCCUCCACGACGACGAGUCGUGUCGCUACGAAGGGCAAGUCGCUGUUUACCAGGAUGUAUACGCGGUU
GACGGACCGACAAGUCUCUAUCACCAAGCCAAUAAGGGAGUUAGAGUCGCCUACUGGAUAGGCUUUGACACCACCCCU
UUUAUGUUUAAGAACUUGGCUGGAGCAUAUCCAUCAUACUCUACCAACUGGGCCGACGAAACCGUGUUAACGGCUCGU
AACAUAGGCCUAUGCAGCUCUGACGUUAUGGAGCGGUCACGUAGAGGGAUGUCCAUUCUUAGAAAGAAGUAUUUGAAA
CCAUCCAACAAUGUUCUAUUCUCUGUUGGCUCGACCAUCUACCACGAGAAGAGGGACUUACUGAGGAGCUGGCACCUG
CCGUCUGUAUUUCACUUACGUGGCAAGCAAAAUUACACAUGUCGGUGUGAGACUAUAGUUAGUUGCGACGGGUACGUC
GUUAAAAGAAUAGCUAUCAGUCCAGGCCUGUAUGGGAAGCCUUCAGGCUAUGCUGCUACGAUGCACCGCGAGGGAUUC
UUGUGCUGCAAAGUGACAGACACAUUGAACGGGGAGAGGGUCUCUUUUCCCGUGUGCACGUAUGUGCCAGCUACAUUG
UGUGACCAAAUGACUGGCAUACUGGCAACAGAUGUCAGUGCGGACGACGCGCAAAAACUGCUGGUUGGGCUCAACCAG
CGUAUAGUCGUCAACGGUCGCACCCAGAGAAACACCAAUACCAUGAAAAAUUACCUUUUGCCCGUAGUGGCCCAGGCA
UUUGCUAGGUGGGCAAAGGAAUAUAAGGAAGAUCAAGAAGAUGAAAGGCCACUAGGACUACGAGAUAGACAGUUAGUC
AUGGGGUGUUGUUGGGCUUUUAGAAGGCACAAGAUAACAUCUAUUUAUAAGCGCCCGGAUACCCAAACCAUCAUCAAA
GUGAACAGCGAUUUCCACUCAUUCGUGCUGCCCAGGAUAGGCAGUAACACAUUGGAGAUCGGGCUGAGAACAAGAAUC
AGGAAAAUGUUAGAGGAGCACAAGGAGCCGUCACCUCUCAUUACCGCCGAGGACGUACAAGAAGCUAAGUGCGCAGCC
GAUGAGGCUAAGGAGGUGCGUGAAGCCGAGGAGUUGCGCGCAGCUCUACCACCUUUGGCAGCUGAUGUUGAGGAGCCC
ACUCUGGAAGCCGAUGUCGACUUGAUGUUACAAGAGGCUGGGGCC

[0999] In one embodiment, NSP2 is provided herein as SEQ ID No: 81, as follows:

[SEQ ID No: 81]
GSVETPRGLIKVTSYDGEDKIGSYAVLSPQAVLKSEKLSCIHPLAEQVIVITHSGRKGRYAVEPYHGKVVVPEGHAIP
VQDFQALSESATIVYNEREFVNRYLHHIATHGGALNTDEEYYKTVKPSEHDGEYLYDIDRKQCVKKELVTGLGLTGEL
VDPPFHEFAYESLRTRPAAPYQVPTIGVYGVPGSGKSGIIKSAVTKKDLVVSAKKENCAEIIRDVKKMKGLDVNARTV
DSVLLNGCKHPVETLYIDEAFACHAGTLRALIAIIRPKKAVLCGDPKQCGFFNMMCLKVHFNHEICTQVFHKSISRRC
TKSVTSVVSTLFYDKKMRTTNPKETKIVIDTTGSTKPKQDDLILTCFRGWVKQLQIDYKGNEIMTAAASQGLTRKGVY
AVRYKVNENPLYAPTSEHVNVLLTRTEDRIVWKTLAGDPWIKTLTAKYPGNFTATIEEWQAEHDAIMRHILERPDPTD
VFQNKANVCWAKALVPVLKTAGIDMTTEQWNTVDYFETDKAHSAEIVLNQLCVRFFGLDLDSGLFSAPTVPLSIRNNH
WDNSPSPNMYGLNKEVVRQLSRRYPQLPRAVATGRVYDMNTGTLRNYDPRINLVPVNRRLPHALVLHHNEHPQSDFSS
FVSKLKGRTVLVVGEKLSVPGKMVDWLSDRPEATFRARLDLGIPGDVPKYDIIFVNVRTPYKYHHYQQCEDHAIKLSM
LTKKACLHLNPGGTCVSIGYGYADRASESIIGAIARQFKFSRVCKPKSSLEETEVLFVFIGYDRKARTHNSYKLSSTL
TNIYTGSRLHEAGC

[1000] Accordingly, NSP2 preferably comprises an amino acid sequence as substantially as set out in SEQ ID No: 81, or a biologically active variant or fragment thereof.

[1001] In one embodiment, NSP2 is encoded by a nucleotide sequence a defined in SEQ ID No: 82, as follows:

[SEQ ID No: 82]
GGCTCAGTGGAGACACCTCGTGGCTTGATAAAGGTTACCAGCTACGATGGCGAGGACAAGATCGGCTCTTACGCTGTG
CTTTCTCCGCAGGCTGTACTCAAGAGTGAAAAATTATCTTGCATCCACCCTCTCGCTGAACAAGTCATAGTGATAACA
CACTCTGGCCGAAAAGGGCGTTATGCCGTGGAACCATACCATGGTAAAGTAGTGGTGCCAGAGGGACATGCAATACCC
GTCCAGGACTTTCAAGCTCTGAGTGAAAGTGCCACCATTGTGTACAACGAACGTGAGTTCGTAAACAGGTACCTGCAC
CATATTGCCACACATGGAGGAGCGCTGAACACTGATGAAGAATATTACAAAACTGTCAAGCCCAGCGAGCACGACGGC
GAATACCTGTACGACATCGACAGGAAACAGTGCGTCAAGAAAGAACTAGTCACTGGGCTAGGGCTCACAGGCGAGCTG
GTGGATCCTCCCTTCCATGAATTCGCCTACGAGAGTCTGAGAACACGACCAGCCGCTCCTTACCAAGTACCAACCATA
GGGGTGTATGGCGTGCCAGGATCAGGCAAGTCTGGCATCATTAAAAGCGCAGTCACCAAAAAAGATCTAGTGGTGAGC
GCCAAGAAAGAAAACTGTGCAGAAATTATAAGGGACGTCAAGAAAATGAAAGGGCTGGACGTCAATGCCAGAACTGTG
GACTCAGTGCTCTTGAATGGATGCAAACACCCCGTAGAGACCCTGTATATTGACGAAGCTTTTGCTTGTCATGCAGGT
ACTCTCAGAGCGCTCATAGCCATTATAAGACCTAAAAAGGCAGTGCTCTGCGGGGATCCCAAACAGTGCGGTTTTTTT
AACATGATGTGCCTGAAAGTGCATTTTAACCACGAGATTTGCACACAAGTCTTCCACAAAAGCATCTCTCGCCGTTGC
ACTAAATCTGTGACTTCGGTCGTCTCAACCTTGTTTTACGACAAAAAAATGAGAACGACGAATCCGAAAGAGACTAAG
ATTGTGATTGACACTACCGGCAGTACCAAACCTAAGCAGGACGATCTCATTCTCACTTGTTTCAGAGGGTGGGTGAAG
CAGTTGCAAATAGATTACAAAGGCAACGAAATAATGACGGCAGCTGCCTCTCAAGGGCTGACCCGTAAAGGTGTGTAT
GCCGTTCGGTACAAGGTGAATGAAAATCCTCTGTACGCACCCACCTCAGAACATGTGAACGTCCTACTGACCCGCACG
GAGGACCGCATCGTGTGGAAAACACTAGCCGGCGACCCATGGATAAAAACACTGACTGCCAAGTACCCTGGGAATTTC
ACTGCCACGATAGAGGAGTGGCAAGCAGAGCATGATGCCATCATGAGGCACATCTTGGAGAGACCGGACCCTACCGAC
GTCTTCCAGAATAAGGCAAACGTGTGTTGGGCCAAGGCTTTAGTGCCGGTGCTGAAGACCGCTGGCATAGACATGACC
ACTGAACAATGGAACACTGTGGATTATTTTGAAACGGACAAAGCTCACTCAGCAGAGATAGTATTGAACCAACTATGC
GTGAGGTTCTTTGGACTCGATCTGGACTCCGGTCTATTTTCTGCACCCACTGTTCCGTTATCCATTAGGAATAATCAC
TGGGATAACTCCCCGTCGCCTAACATGTACGGGCTGAATAAAGAAGTGGTCCGTCAGCTCTCTCGCAGGTACCCACAA
CTGCCTCGGGCAGTTGCCACTGGAAGAGTCTATGACATGAACACTGGTACACTGCGCAATTATGATCCGCGCATAAAC
CTAGTACCTGTAAACAGAAGACTGCCTCATGCTTTAGTCCTCCACCATAATGAACACCCACAGAGTGACTTTTCTTCA
TTCGTCAGCAAATTGAAGGGCAGAACTGTCCTGGTGGTCGGGGAAAAGTTGTCCGTCCCAGGCAAAATGGTTGACTGG
TTGTCAGACCGGCCTGAGGCTACCTTCAGAGCTCGGCTGGATTTAGGCATCCCAGGTGATGTGCCCAAATATGACATA
ATATTTGTTAATGTGAGGACCCCATATAAATACCATCACTATCAGCAGTGTGAAGACCATGCCATTAAGCTTAGCATG
TTGACCAAGAAAGCTTGTCTGCATCTGAATCCCGGCGGAACCTGTGTCAGCATAGGTTATGGTTACGCTGACAGGGCC
AGCGAAAGCATCATTGGTGCTATAGCGCGGCAGTTCAAGTTTTCCCGGGTATGCAAACCGAAATCCTCACTTGAAGAG
ACGGAAGTTCTGTTTGTATTCATTGGGTACGATCGCAAGGCCCGTACGCACAATTCTTACAAGCTTTCATCAACCTTG
ACCAACATTTATACAGGTTCCAGACTCCACGAAGCCGGATGT

[1002] Accordingly, preferably NSP2 is encoded by a nucleotide sequence as substantially as set out in SEQ ID No: 82, or a variant or fragment thereof.

[1003] Thus, the RNA construct may comprise SEQ ID No: 83, as follows:

[SEQ ID No: 83]
GGCUCAGUGGAGACACCUCGUGGCUUGAUAAAGGUUACCAGCUACGAUGGCGAGGACAAGAUCGGCUCUUACGCUGUG
CUUUCUCCGCAGGCUGUACUCAAGAGUGAAAAAUUAUCUUGCAUCCACCCUCUCGCUGAACAAGUCAUAGUGAUAACA
CACUCUGGCCGAAAAGGGCGUUAUGCCGUGGAACCAUACCAUGGUAAAGUAGUGGUGCCAGAGGGACAUGCAAUACCC
GUCCAGGACUUUCAAGCUCUGAGUGAAAGUGCCACCAUUGUGUACAACGAACGUGAGUUCGUAAACAGGUACCUGCAC
CAUAUUGCCACACAUGGAGGAGCGCUGAACACUGAUGAAGAAUAUUACAAAACUGUCAAGCCCAGCGAGCACGACGGC
GAAUACCUGUACGACAUCGACAGGAAACAGUGCGUCAAGAAAGAACUAGUCACUGGGCUAGGGCUCACAGGCGAGCUG
GUGGAUCCUCCCUUCCAUGAAUUCGCCUACGAGAGUCUGAGAACACGACCAGCCGCUCCUUACCAAGUACCAACCAUA
GGGGUGUAUGGCGUGCCAGGAUCAGGCAAGUCUGGCAUCAUUAAAAGCGCAGUCACCAAAAAAGAUCUAGUGGUGAGC
GCCAAGAAAGAAAACUGUGCAGAAAUUAUAAGGGACGUCAAGAAAAUGAAAGGGCUGGACGUCAAUGCCAGAACUGUG
GACUCAGUGCUCUUGAAUGGAUGCAAACACCCCGUAGAGACCCUGUAUAUUGACGAAGCUUUUGCUUGUCAUGCAGGU
ACUCUCAGAGCGCUCAUAGCCAUUAUAAGACCUAAAAAGGCAGUGCUCUGCGGGGAUCCCAAACAGUGCGGUUUUUUU
AACAUGAUGUGCCUGAAAGUGCAUUUUAACCACGAGAUUUGCACACAAGUCUUCCACAAAAGCAUCUCUCGCCGUUGC
ACUAAAUCUGUGACUUCGGUCGUCUCAACCUUGUUUUACGACAAAAAAAUGAGAACGACGAAUCCGAAAGAGACUAAG
AUUGUGAUUGACACUACCGGCAGUACCAAACCUAAGCAGGACGAUCUCAUUCUCACUUGUUUCAGAGGGUGGGUGAAG
CAGUUGCAAAUAGAUUACAAAGGCAACGAAAUAAUGACGGCAGCUGCCUCUCAAGGGCUGACCCGUAAAGGUGUGUAU
GCCGUUCGGUACAAGGUGAAUGAAAAUCCUCUGUACGCACCCACCUCAGAACAUGUGAACGUCCUACUGACCCGCACG
GAGGACCGCAUCGUGUGGAAAACACUAGCCGGCGACCCAUGGAUAAAAACACUGACUGCCAAGUACCCUGGGAAUUUC
ACUGCCACGAUAGAGGAGUGGCAAGCAGAGCAUGAUGCCAUCAUGAGGCACAUCUUGGAGAGACCGGACCCUACCGAC
GUCUUCCAGAAUAAGGCAAACGUGUGUUGGGCCAAGGCUUUAGUGCCGGUGCUGAAGACCGCUGGCAUAGACAUGACC
ACUGAACAAUGGAACACUGUGGAUUAUUUUGAAACGGACAAAGCUCACUCAGCAGAGAUAGUAUUGAACCAACUAUGC
GUGAGGUUCUUUGGACUCGAUCUGGACUCCGGUCUAUUUUCUGCACCCACUGUUCCGUUAUCCAUUAGGAAUAAUCAC
UGGGAUAACUCCCCGUCGCCUAACAUGUACGGGCUGAAUAAAGAAGUGGUCCGUCAGCUCUCUCGCAGGUACCCACAA
CUGCCUCGGGCAGUUGCCACUGGAAGAGUCUAUGACAUGAACACUGGUACACUGCGCAAUUAUGAUCCGCGCAUAAAC
CUAGUACCUGUAAACAGAAGACUGCCUCAUGCUUUAGUCCUCCACCAUAAUGAACACCCACAGAGUGACUUUUCUUCA
UUCGUCAGCAAAUUGAAGGGCAGAACUGUCCUGGUGGUCGGGGAAAAGUUGUCCGUCCCAGGCAAAAUGGUUGACUGG
UUGUCAGACCGGCCUGAGGCUACCUUCAGAGCUCGGCUGGAUUUAGGCAUCCCAGGUGAUGUGCCCAAAUAUGACAUA
AUAUUUGUUAAUGUGAGGACCCCAUAUAAAUACCAUCACUAUCAGCAGUGUGAAGACCAUGCCAUUAAGCUUAGCAUG
UUGACCAAGAAAGCUUGUCUGCAUCUGAAUCCCGGCGGAACCUGUGUCAGCAUAGGUUAUGGUUACGCUGACAGGGCC
AGCGAAAGCAUCAUUGGUGCUAUAGCGCGGCAGUUCAAGUUUUCCCGGGUAUGCAAACCGAAAUCCUCACUUGAAGAG
ACGGAAGUUCUGUUUGUAUUCAUUGGGUACGAUCGCAAGGCCCGUACGCACAAUUCUUACAAGCUUUCAUCAACCUUG
ACCAACAUUUAUACAGGUUCCAGACUCCACGAAGCCGGAUGU

[1004] Accordingly, therefore, preferably the RNA construct comprises an RNA nucleotide sequence substantially as set out as SEQ ID No: 83, or a variant or fragment thereof.

[1005] In one embodiment, NSP3 is provided herein as SEQ ID No: 84, as follows:

[SEQ ID No: 84]
APSYHVVRGDIATATEGVIINAANSKGQPGGGVCGALYKKFPESFDLQPIEVGKARLVKGAAKHIIHAVGPNFNKVSE
VEGDKQLAEAYESIAKIVNDNNYKSVAIPLLSTGIFSGNKDRLTQSLNHLLTALDTTDADVAIYCRDKKWEMTLKEAV
ARREAVEEICISDDSSVTEPDAELVRVHPKSSLAGRKGYSTSDGKTFSYLEGTKFHQAAKDIAEINAMWPVATEANEQ
VCMYILGESMSSIRSKCPVEESEASTPPSTLPCLCIHAMTPERVQRLKASRPEQITVCSSFPLPKYRITGVQKIQCSQ
PILFSPKVPAYIHPRKYLVETPPVDETPEPSAENQSTEGTPEQPPLITEDETRTRTPEPIIIEEEEEDSISLLSDGPT
HQVLQVEADIHGPPSVSSSSWSIPHASDFDVDSLSILDTLEGASVTSGATSAETNSYFAKSMEFLARPVPAPRTVFRN
AQQQRFDAGA

[1006] Accordingly, preferably NSP3 comprises an amino acid sequence as substantially as set out in SEQ ID No: 84, or a biologically active variant or fragment thereof.

[1007] In one embodiment, NSP3 is encoded by a nucleotide sequence a defined in SEQ ID No: 85, as follows:

[SEQ ID No: 85]
GCACCCTCATATCATGTGGTGCGAGGGGATATTGCCACGGCCACCGAAGGAGTGATTATAAATGCTGCTAACAGCAAA
GGACAACCTGGCGGAGGGGTGTGCGGAGCGCTGTATAAGAAATTCCCGGAAAGCTTCGATTTACAGCCGATCGAAGTA
GGAAAAGCGCGACTGGTCAAAGGTGCAGCTAAACATATCATTCATGCCGTAGGACCAAACTTCAACAAAGTTTCGGAG
GTTGAAGGTGACAAACAGTTGGCAGAGGCTTATGAGTCCATCGCTAAGATTGTCAACGATAACAATTACAAGTCAGTA
GCGATTCCACTGTTGTCCACCGGCATCTTTTCCGGGAACAAAGATCGACTAACCCAATCATTGAACCATTTGCTGACA
GCTTTAGACACCACTGATGCAGATGTAGCCATATACTGCAGGGACAAGAAATGGGAAATGACTCTCAAGGAAGCAGTG
GCTAGGAGAGAAGCAGTGGAGGAGATATGCATATCCGACGACTCTTCAGTGACAGAACCTGATGCAGAGCTGGTGAGG
GTGCATCCGAAGAGTTCTTTGGCTGGAAGGAAGGGCTACAGCACAAGCGATGGCAAAACTTTCTCATATTTGGAAGGG
ACCAAGTTTCACCAGGCGGCCAAGGATATAGCAGAAATTAATGCCATGTGGCCCGTTGCAACGGAGGCCAATGAGCAG
GTATGCATGTATATCCTCGGAGAAAGCATGAGCAGTATTAGGTCGAAATGCCCCGTCGAAGAGTCGGAAGCCTCCACA
CCACCTAGCACGCTGCCTTGCTTGTGCATCCATGCCATGACTCCAGAAAGAGTACAGCGCCTAAAAGCCTCACGTCCA
GAACAAATTACTGTGTGCTCATCCTTTCCATTGCCGAAGTATAGAATCACTGGTGTGCAGAAGATCCAATGCTCCCAG
CCTATATTGTTCTCACCGAAAGTGCCTGCGTATATTCATCCAAGGAAGTATCTCGTGGAAACACCACCGGTAGACGAG
ACTCCGGAGCCATCGGCAGAGAACCAATCCACAGAGGGGACACCTGAACAACCACCACTTATAACCGAGGATGAGACC
AGGACTAGAACGCCTGAGCCGATCATCATCGAAGAGGAAGAAGAGGATAGCATAAGTTTGCTGTCAGATGGCCCGACC
CACCAGGTGCTGCAAGTCGAGGCAGACATTCACGGGCCGCCCTCTGTATCTAGCTCATCCTGGTCCATTCCTCATGCA
TCCGACTTTGATGTGGACAGTTTATCCATACTTGACACCCTGGAGGGAGCTAGCGTGACCAGCGGGGCAACGTCAGCC
GAGACTAACTCTTACTTCGCAAAGAGTATGGAGTTTCTGGCGCGACCGGTGCCTGCGCCTCGAACAGTATTCAGGAAC
CCTCCACATCCCGCTCCGCGCACAAGAACACCGTCACTTGCACCCAGCAGGGCCTGCTCGAGAACCAGCCTAGTTTCC
ACCCCGCCAGGCGTGAATAGGGTGATCACTAGAGAGGAGCTCGAGGCGCTTACCCCGTCACGCACTCCTAGCAGGTCG
GCACAACAACAATGACGGTTTGATGCGGGTGCA

[1008] Accordingly, preferably NSP3 comprises an amino acid sequence as substantially as set out in SEQ ID No: 85, or a biologically active variant or fragment thereof.

[1009] Thus, the RNA construct may comprise SEQ ID No: 86, as follows:

[SEQ ID No: 86]
GCACCCUCAUAUCAUGUGGUGCGAGGGGAUAUUGCCACGGCCACCGAAGGAGUGAUUAUAAAUGCUGCUAACAGCAAA
GGACAACCUGGCGGAGGGGUGUGCGGAGCGCUGUAUAAGAAAUUCCCGGAAAGCUUCGAUUUACAGCCGAUCGAAGUA
GGAAAAGCGCGACUGGUCAAAGGUGCAGCUAAACAUAUCAUUCAUGCCGUAGGACCAAACUUCAACAAAGUUUCGGAG
GUUGAAGGUGACAAACAGUUGGCAGAGGCUUAUGAGUCCAUCGCUAAGAUUGUCAACGAUAACAAUUACAAGUCAGUA
GCGAUUCCACUGUUGUCCACCGGCAUCUUUUCCGGGAACAAAGAUCGACUAACCCAAUCAUUGAACCAUUUGCUGACA
GCUUUAGACACCACUGAUGCAGAUGUAGCCAUAUACUGCAGGGACAAGAAAUGGGAAAUGACUCUCAAGGAAGCAGUG
GCUAGGAGAGAAGCAGUGGAGGAGAUAUGCAUAUCCGACGACUCUUCAGUGACAGAACCUGAUGCAGAGCUGGUGAGG
GUGCAUCCGAAGAGUUCUUUGGCUGGAAGGAAGGGCUACAGCACAAGCGAUGGCAAAACUUUCUCAUAUUUGGAAGGG
ACCAAGUUUCACCAGGCGGCCAAGGAUAUAGCAGAAAUUAAUGCCAUGUGGCCCGUUGCAACGGAGGCCAAUGAGCAG
GUAUGCAUGUAUAUCCUCGGAGAAAGCAUGAGCAGUAUUAGGUCGAAAUGCCCCGUCGAAGAGUCGGAAGCCUCCACA
CCACCUAGCACGCUGCCUUGCUUGUGCAUCCAUGCCAUGACUCCAGAAAGAGUACAGCGCCUAAAAGCCUCACGUCCA
GAACAAAUUACUGUGUGCUCAUCCUUUCCAUUGCCGAAGUAUAGAAUCACUGGUGUGCAGAAGAUCCAAUGCUCCCAG
CCUAUAUUGUUCUCACCGAAAGUGCCUGCGUAUAUUCAUCCAAGGAAGUAUCUCGUGGAAACACCACCGGUAGACGAG
ACUCCGGAGCCAUCGGCAGAGAACCAAUCCACAGAGGGGACACCUGAACAACCACCACUUAUAACCGAGGAUGAGACC
AGGACUAGAACGCCUGAGCCGAUCAUCAUCGAAGAGGAAGAAGAGGAUAGCAUAAGUUUGCUGUCAGAUGGCCCGACC
CACCAGGUGCUGCAAGUCGAGGCAGACAUUCACGGGCCGCCCUCUGUAUCUAGCUCAUCCUGGUCCAUUCCUCAUGCA
UCCGACUUUGAUGUGGACAGUUUAUCCAUACUUGACACCCUGGAGGGAGCUAGCGUGACCAGCGGGGCAACGUCAGCC
GAGACUAACUCUUACUUCGCAAAGAGUAUGGAGUUUCUGGCGCGACCGGUGCCUGCGCCUCGAACAGUAUUCAGGAAC
CCUCCACAUCCCGCUCCGCGCACAAGAACACCGUCACUUGCACCCAGCAGGGCCUGCUCGAGAACCAGCCUAGUUUCC
ACCCCGCCAGGCGUGAAUAGGGUGAUCACUAGAGAGGAGCUCGAGGCGCUUACCCCGUCACGCACUCCUAGCAGGUCG
GUCUCGAGAACCAGCCUGGUCUCCAACCCGCCAGGCGUAAAUAGGGUGAUUACAAGAGAGGAGUUUGAGGCGUUCGUA
GCACAACAACAAUGACGGUUUGAUGCGGGUGCA

[1010] Accordingly, therefore, preferably the RNA construct comprises an RNA nucleotide sequence substantially as set out as SEQ ID No: 86, or a variant or fragment thereof.

[1011] In one embodiment, NSP4 is provided herein as SEQ ID No: 87, as follows:

[SEQ ID No: 87]
YIFSSDTGQGHLQQKSVRQTVLSEVVLERTELEISYAPRLDQEKEELLRKKLQLNPTPANRSRYQSRKVENMKAITAR
RILQGLGHYLKAEGKVECYRTLHPVPLYSSSVNRAFSSPKVAVEACNAMLKENFPTVASYCIIPEYDAYLDMVDGASC
CLDTASFCPAKLRSFPKKHSYLEPTIRSAVPSAIQNTLQNVLAAATKRNCNVTQMRELPVLDSAAFNVECFKKYACNN
EYWETFKENPIRLTEENVVNYITKLKGPKAAALFAKTHNLNMLQDIPMDRFVMDLKRDVKVTPGTKHTEERPKVQVIQ
AADPLATAYLCGIHRELVRRLNAVLLPNIHTLFDMSAEDFDAIIAEHFQPGDCVLETDIASFDKSEDDAMALTALMIL
EDLGVDAELLTLIEAAFGEISSIHLPTKTKFKFGAMMKSGMFLTLFVNTVINIVIASRVLRERLIGSPCAAFIGDDNI
VKGVKSDKLMADRCATWLNMEVKIIDAVVGEKAPYFCGGFILCDSVTGTACRVADPLKRLFKLGKPLAADDEHDDDRR
RALHEESTRWNRVGILSELCKAVESRYETVGTSIIVMAMTTLASSVKSFSYLRGAPITLYG

[1012] Accordingly, preferably NSP4 comprises an amino acid sequence as substantially as set out in SEQ ID No: 87, or a biologically active variant or fragment thereof.

[1013] In one embodiment, NSP4 is encoded by a nucleotide sequence a defined in SEQ ID No: 88, as follows:

[SEQ ID No: 88]
TACATCTTTTCCTCCGACACCGGTCAAGGGCATTTACAACAAAAATCAGTAAGGCAAACGGTGCTATCCGAAGTGGTG
TTGGAGAGGACCGAATTGGAGATTTCGTATGCCCCGCGCCTCGACCAAGAAAAAGAAGAATTACTACGCAAGAAATTA
CAGTTAAATCCCACACCTGCTAACAGAAGCAGATACCAGTCCAGGAAGGTGGAGAACATGAAAGCCATAACAGCTAGA
CGTATTCTGCAAGGCCTAGGGCATTATTTGAAGGCAGAAGGAAAAGTGGAGTGCTACCGAACCCTGCATCCTGTTCCT
TTGTATTCATCTAGTGTGAACCGTGCCTTTTCAAGCCCCAAGGTCGCAGTGGAAGCCTGTAACGCCATGTTGAAAGAG
AACTTTCCGACTGTGGCTTCTTACTGTATTATTCCAGAGTACGATGCCTATTTGGACATGGTTGACGGAGCTTCATGC
TGCTTAGACACTGCCAGTTTTTGCCCTGCAAAGCTGCGCAGCTTTCCAAAGAAACACTCCTATTTGGAACCCACAATA
CGATCGGCAGTGCCTTCAGCGATCCAGAACACGCTCCAGAACGTCCTGGCAGCTGCCACAAAAAGAAATTGCAATGTC
ACGCAAATGAGAGAATTGCCCGTATTGGATTCGGCGGCCTTTAATGTGGAATGCTTCAAGAAATATGCGTGTAATAAT
GAATATTGGGAAACGTTTAAAGAAAACCCCATCAGGCTTACTGAAGAAAACGTGGTAAATTACATTACCAAATTAAAA
GGACCAAAAGCTGCTGCTCTTTTTGCGAAGACACATAATTTGAATATGTTGCAGGACATACCAATGGACAGGTTTGTA
ATGGACTTAAAGAGAGACGTGAAAGTGACTCCAGGAACAAAACATACTGAAGAACGGCCCAAGGTACAGGTGATCCAG
GCTGCCGATCCGCTAGCAACAGCGTATCTGTGCGGAATCCACCGAGAGCTGGTTAGGAGATTAAATGCGGTCCTGCTT
CCGAACATTCATACACTGTTTGATATGTCGGCTGAAGACTTTGACGCTATTATAGCCGAGCACTTCCAGCCTGGGGAT
TGTGTTCTGGAAACTGACATCGCGTCGTTTGATAAAAGTGAGGACGACGCCATGGCTCTGACCGCGTTAATGATTCTG
GAAGACTTAGGTGTGGACGCAGAGCTGTTGACGCTGATTGAGGCGGCTTTCGGCGAAATTTCATCAATACATTTGCCC
ACTAAAACTAAATTTAAATTCGGAGCCATGATGAAATCTGGAATGTTCCTCACACTGTTTGTGAACACAGTCATTAAC
ATTGTAATCGCAAGCAGAGTGTTGAGAGAACGGCTAACCGGATCACCATGTGCAGCATTCATTGGAGATGACAATATC
GTGAAAGGAGTCAAATCGGACAAATTAATGGCAGACAGGTGCGCCACCTGGTTGAATATGGAAGTCAAGATTATAGAT
GCTGTGGTGGGCGAGAAAGCGCCTTATTTCTGTGGAGGGTTTATTTTGTGTGACTCCGTGACCGGCACAGCGTGCCGT
GTGGCAGACCCCCTAAAAAGGCTGTTTAAGCTTGGCAAACCTCTGGCAGCAGACGATGAACATGATGATGACAGGAGA
AGGGCATTGCATGAAGAGTCAACACGCTGGAACCGAGTGGGTATTCTTTCAGAGCTGTGCAAGGCAGTAGAATCAAGG
TATGAAACCGTAGGAACTTCCATCATAGTTATGGCCATGACTACTCTAGCTAGCAGTGTTAAATCATTCAGCTACCTG
AGAGGGGCCCCTATAACTCTCTACGGC

[1014] Accordingly, preferably NSP4 is encoded by a nucleotide sequence as substantially as set out in SEQ ID No: 88, or a variant or fragment thereof.

[1015] Thus, the RNA construct may comprise SEQ ID No: 89, as follows:

[SEQ ID No: 89]
UACAUCUUUUCCUCCGACACCGGUCAAGGGCAUUUACAACAAAAAUCAGUAAGGCAAACGGUGCUAUCCGAAGUGGUG
UUGGAGAGGACCGAAUUGGAGAUUUCGUAUGCCCCGCGCCUCGACCAAGAAAAAGAAGAAUUACUACGCAAGAAAUUA
CAGUUAAAUCCCACACCUGCUAACAGAAGCAGAUACCAGUCCAGGAAGGUGGAGAACAUGAAAGCCAUAACAGCUAGA
CGUAUUCUGCAAGGCCUAGGGCAUUAUUUGAAGGCAGAAGGAAAAGUGGAGUGCUACCGAACCCUGCAUCCUGUUCCU
UUGUAUUCAUCUAGUGUGAACCGUGCCUUUUCAAGCCCCAAGGUCGCAGUGGAAGCCUGUAACGCCAUGUUGAAAGAG
AACUUUCCGACUGUGGCUUCUUACUGUAUUAUUCCAGAGUACGAUGCCUAUUUGGACAUGGUUGACGGAGCUUCAUGC
UGCUUAGACACUGCCAGUUUUUGCCCUGCAAAGCUGCGCAGCUUUCCAAAGAAACACUCCUAUUUGGAACCCACAAUA
CGAUCGGCAGUGCCUUCAGCGAUCCAGAACACGCUCCAGAACGUCCUGGCAGCUGCCACAAAAAGAAAUUGCAAUGUC
ACGCAAAUGAGAGAAUUGCCCGUAUUGGAUUCGGCGGCCUUUAAUGUGGAAUGCUUCAAGAAAUAUGCGUGUAAUAAU
GAAUAUUGGGAAACGUUUAAAGAAAACCCCAUCAGGCUUACUGAAGAAAACGUGGUAAAUUACAUUACCAAAUUAAAA
GGACCAAAAGCUGCUGCUCUUUUUGCGAAGACACAUAAUUUGAAUAUGUUGCAGGACAUACCAAUGGACAGGUUUGUA
AUGGACUUAAAGAGAGACGUGAAAGUGACUCCAGGAACAAAACAUACUGAAGAACGGCCCAAGGUACAGGUGAUCCAG
GCUGCCGAUCCGCUAGCAACAGCGUAUCUGUGCGGAAUCCACCGAGAGCUGGUUAGGAGAUUAAAUGCGGUCCUGCUU
CCGAACAUUCAUACACUGUUUGAUAUGUCGGCUGAAGACUUUGACGCUAUUAUAGCCGAGCACUUCCAGCCUGGGGAU
UGUGUUCUGGAAACUGACAUCGCGUCGUUUGAUAAAAGUGAGGACGACGCCAUGGCUCUGACCGCGUUAAUGAUUCUG
GAAGACUUAGGUGUGGACGCAGAGCUGUUGACGCUGAUUGAGGCGGCUUUCGGCGAAAUUUCAUCAAUACAUUUGCCC
ACUAAAACUAAAUUUAAAUUCGGAGCCAUGAUGAAAUCUGGAAUGUUCCUCACACUGUUUGUGAACACAGUCAUUAAC
AUUGUAAUCGCAAGCAGAGUGUUGAGAGAACGGCUAACCGGAUCACCAUGUGCAGCAUUCAUUGGAGAUGACAAUAUC
GUGAAAGGAGUCAAAUCGGACAAAUUAAUGGCAGACAGGUGCGCCACCUGGUUGAAUAUGGAAGUCAAGAUUAUAGAU
GCUGUGGUGGGCGAGAAAGCGCCUUAUUUCUGUGGAGGGUUUAUUUUGUGUGACUCCGUGACCGGCACAGCGUGCCGU
GUGGCAGACCCCCUAAAAAGGCUGUUUAAGCUUGGCAAACCUCUGGCAGCAGACGAUGAACAUGAUGAUGACAGGAGA
AGGGCAUUGCAUGAAGAGUCAACACGCUGGAACCGAGUGGGUAUUCUUUCAGAGCUGUGCAAGGCAGUAGAAUCAAGG
UAUGAAACCGUAGGAACUUCCAUCAUAGUUAUGGCCAUGACUACUCUAGCUAGCAGUGUUAAAUCAUUCAGCUACCUG
AGAGGGGCCCCUAUAACUCUCUACGGC

[1016] Accordingly, therefore, preferably the RNA construct comprises an RNA nucleotide sequence substantially as set out as SEQ ID No: 89, or a variant or fragment thereof.

[1017] Preferably, together with proteins present in a host cell, the non-structural proteins encoded by the RNA construct of the invention form an enzyme complex (i.e. a replicase) that is required for genome replication and transcription of the sequences encoding the at least one therapeutic biomolecule and the at least one innate modulatory protein. For example, the one or more non-structural protein may encode a polymerase to enable the construct to amplify the nucleotide sequences encoding the at least one peptide or protein of interest (i.e. therapeutic biomolecule) and the at least one innate modulatory protein.

[1018] The host cell may be a eukaryotic or prokaryotic host cell. Preferably, the host cell is a eukaryotic host cell. More preferably, the host cell is a mammalian host cell.

[1019] The RNA construct may further comprise a promoter disposed 5′ of the at least one non-structural protein, such that the promoter is operably linked to the sequence encoding the at least one non-structural protein and enables expression of the at least one non-structural protein in a host cell.

[1020] Preferably, the RNA construct comprises a 5′ UTR conserved sequence element, which may be referred to herein as SEQ ID No: 90, as follows:

[SEQ ID No: 90]
AUGGGCGGCGCAUGAGAGAAGCCCAGACCAAUUACCUACCCAAA

[1021] Accordingly, preferably the UTR is disposed 5′ of the at least one non-structural protein and comprises a nucleotide sequence substantially as set out in SEQ ID No: 90, or a fragment or variant thereof.

[1022] Preferably, the RNA construct comprises a 3′ UTR conserved sequence element, which may be referred to herein as SEQ ID No: 91, as follows:

[SEQ ID No: 91]
AAUUGGCAAGCUGCUUACAUAGAACUCGCGGCGAUUGGCAUGCCGCCUU
AAAAUUUUUAUUUUAUUUUUCUUUUCUUUUCCGAAUCGGAUUUUGUUUU
UAAUAUUUCAAAAAAAAAAAAAAAAAAAAAAAAAAAAAAAAAAA

[1023] Accordingly, preferably the 3′ UTR is disposed 3′ of the at least one non-structural protein and comprises a nucleotide sequence substantially as set out in SEQ ID No: 91, or a fragment or variant thereof.

[1024] Preferably, the RNA construct comprises a polyA tail. Preferably, the polyA tail is disposed at the 3′ end of the construct. The poly A tail may comprise at least 35 nt, or at least 40 nt, or at least 45 nt, or at least 50 nt, wherein each nt is an adenine. In another embodiment, the polyA tail may comprise at least 55 nt or at least 60 nt, wherein each nt is an adenine. In yet another embodiment, the polyA tail may comprise at least 60 adenines, followed by one or more non-adenine nucleotides (i.e. G, C or T, preferably guanine), and then another at least 35 nt, or at least 40 nt, or at least 45 nt, or at least 50 nt, or at least 55 nt, or at least 60 nt, wherein each nt is an adenine.

[1025] The RNA construct may further comprise a 5′ cap. In the context of the present invention, the term “5′-cap” includes a 5′-cap analog that resembles the RNA cap structure and is modified to possess the ability to stabilize RNA and/or enhance translation of RNA if attached thereto, preferably in vivo and/or in a cell.

[1026] An RNA with a 5′-cap may be achieved by in vitro transcription of a DNA template in presence of said 5′-cap, wherein said 5′-cap is co-transcriptionally incorporated into the generated RNA strand, or the RNA may be generated, for example, by in vitro transcription, and the 5′-cap may be attached to the RNA post-transcriptionally using capping enzymes, for example, capping enzymes of vaccinia virus. In capped RNA, the 3′ position of the first base of a (capped) RNA molecule is linked to the 5′ position of the subsequent base of the RNA molecule (“second base”) via a phosphodiester bond.

[1027] In one embodiment, the RNA construct comprises, preferably 5′ to 3′, a promoter, a sequence encoding at least one therapeutic biomolecule, a linker sequence, and at least one sequence encoding an IIP. In one embodiment, the RNA construct comprises, preferably 5′ to 3′, a promoter, a sequence encoding at least one IIP, a linker sequence, and a sequence encoding at least one therapeutic biomolecule. The linker may be F-T2a or IRES in either embodiment.

[1028] In another embodiment, the RNA construct comprises, preferably 5′ to 3′, a promoter, a sequence encoding at least one non-structural protein, a sub genomic promoter, a sequence encoding at least one therapeutic biomolecule, a linker sequence, and a sequence encoding at least one viral IIP. In another embodiment, the RNA construct comprises, preferably 5′ to 3′, a promoter, a sequence encoding at least one non-structural protein, a sub genomic promoter, a sequence encoding at least one viral IIP, a linker sequence, and a sequence encoding at least one therapeutic biomolecule. The linker may be F-T2a or IRES in either embodiment.

[1029] In yet another embodiment, the RNA construct comprises, preferably 5′ to 3′, a promoter, a sequence encoding at least one non-structural protein, a sub genomic promoter, a sequence encoding at least one therapeutic biomolecule, a linker sequence, a sequence encoding at least one viral IIP, and a polyA tail. In yet another embodiment, the RNA construct comprises, preferably 5′ to 3′, a promoter, a sequence encoding at least one non-structural protein, a sub genomic promoter, a sequence encoding at least one viral IIP, a linker sequence, a sequence encoding at least one therapeutic biomolecule, and a polyA tail. The linker may be F-T2a or IRES in either embodiment.

[1030] In another embodiment, the RNA construct comprises, preferably 5′ to 3′, a promoter, a sequence encoding at least one non-structural protein, a first sub genomic promoter, a sequence encoding at least one therapeutic biomolecule, a second sub genomic promoter, a sequence encoding at least one viral IIP, and a polyA tail. In another embodiment, the RNA construct comprises, preferably 5′ to 3′, a promoter, a sequence encoding at least one non-structural protein, a first sub genomic promoter, a sequence encoding at least one viral IIP, a second sub genomic promoter, a sequence encoding at least one therapeutic biomolecule, and a polyA tail.

[1031] Most preferably, the RNA construct comprises, 5′ to 3′, a 5′ cap, a promoter, nsP1, nsP2, nsP3, nsP4, the sub genomic promoter 26S, a sequence encoding a therapeutic biomolecule, a linker sequence, a sequence encoding the viral IIP and a polyA tail. Most preferably, the RNA construct comprises, 5′ to 3′, a 5′ cap, a promoter, nsP1, nsP2, nsP3v, nsP4, the sub genomic promoter 26S, a sequence encoding a viral IIP, a linker sequence, a sequence encoding a therapeutic biomolecule; and a polyA tail.

[1032] In one embodiment, therefore, the RNA construct may encode or comprise a GOI—furin T2A—HCV E6 (which is the first viral IIP mentioned herein, but it will be appreciated that any of the IIPs or linkers disclosed herein may be used). Hence, the RNA construct may comprise or consist of a single RNA construct comprising or consisting of SEQ ID No: 92, a GOI, and SEQ ID No: 457, in a single RNA construct. SEQ ID No: 92 and SEQ ID No: 457 are as follows:

[SEQ ID No: 92]
AUGGGCGGCGCAUGAGAGAAGCCCAGACCAAUUACCUACCCAAAAUGGAGAAAGUUCACGUUGACAUCGAGG
AAGACAGCCCAUUCCUCAGAGCUUUGCAGCGGAGCUUCCCGCAGUUUGAGGUAGAAGCCAAGCAGGUCACUG
AUAAUGACCAUGCUAAUGCCAGAGCGUUUUCGCAUCUGGCUUCAAAACUGAUCGAAACGGAGGUGGACCCAU
CCGACACGAUCCUUGACAUUGGAAGUGCGCCCGCCCGCAGAAUGUAUUCUAAGCACAAGUAUCAUUGUAUCU
GUCCGAUGAGAUGUGCGGAAGAUCCGGACAGAUUGUAUAAGUAUGCAACUAAGCUGAAGAAAAACUGUAAGG
AAAUAACUGAUAAGGAAUUGGACAAGAAAAUGAAGGAGCUGGCCGCCGUCAUGAGCGACCCUGACCUGGAAA
CUGAGACUAUGUGCCUCCACGACGACGAGUCGUGUCGCUACGAAGGGCAAGUCGCUGUUUACCAGGAUGUAU
ACGCGGUUGACGGACCGACAAGUCUCUAUCACCAAGCCAAUAAGGGAGUUAGAGUCGCCUACUGGAUAGGCU
UUGACACCACCCCUUUUAUGUUUAAGAACUUGGCUGGAGCAUAUCCAUCAUACUCUACCAACUGGGCCGACG
AAACCGUGUUAACGGCUCGUAACAUAGGCCUAUGCAGCUCUGACGUUAUGGAGCGGUCACGUAGAGGGAUGU
CCAUUCUUAGAAAGAAGUAUUUGAAACCAUCCAACAAUGUUCUAUUCUCUGUUGGCUCGACCAUCUACCACG
AGAAGAGGGACUUACUGAGGAGCUGGCACCUGCCGUCUGUAUUUCACUUACGUGGCAAGCAAAAUUACACAU
GUCGGUGUGAGACUAUAGUUAGUUGCGACGGGUACGUCGUUAAAAGAAUAGCUAUCAGUCCAGGCCUGUAUG
GGAAGCCUUCAGGCUAUGCUGCUACGAUGCACCGCGAGGGAUUCUUGUGCUGCAAAGUGACAGACACAUUGA
ACGGGGAGAGGGUCUCUUUUCCCGUGUGCACGUAUGUGCCAGCUACAUUGUGUGACCAAAUGACUGGCAUAC
UGGCAACAGAUGUCAGUGCGGACGACGCGCAAAAACUGCUGGUUGGGCUCAACCAGCGUAUAGUCGUCAACG
GUCGCACCCAGAGAAACACCAAUACCAUGAAAAAUUACCUUUUGCCCGUAGUGGCCCAGGCAUUUGCUAGGU
GGGCAAAGGAAUAUAAGGAAGAUCAAGAAGAUGAAAGGCCACUAGGACUACGAGAUAGACAGUUAGUCAUGG
GGUGUUGUUGGGCUUUUAGAAGGCACAAGAUAACAUCUAUUUAUAAGCGCCCGGAUACCCAAACCAUCAUCA
AAGUGAACAGCGAUUUCCACUCAUUCGUGCUGCCCAGGAUAGGCAGUAACACAUUGGAGAUCGGGCUGAGAA
CAAGAAUCAGGAAAAUGUUAGAGGAGCACAAGGAGCCGUCACCUCUCAUUACCGCCGAGGACGUACAAGAAG
CUAAGUGCGCAGCCGAUGAGGCUAAGGAGGUGCGUGAAGCCGAGGAGUUGCGCGCAGCUCUACCACCUUUGG
CAGCUGAUGUUGAGGAGCCCACUCUGGAAGCCGAUGUCGACUUGAUGUUACAAGAGGCUGGGGCCGGCUCAG
UGGAGACACCUCGUGGCUUGAUAAAGGUUACCAGCUACGAUGGCGAGGACAAGAUCGGCUCUUACGCUGUGC
UUUCUCCGCAGGCUGUACUCAAGAGUGAAAAAUUAUCUUGCAUCCACCCUCUCGCUGAACAAGUCAUAGUGA
UAACACACUCUGGCCGAAAAGGGCGUUAUGCCGUGGAACCAUACCAUGGUAAAGUAGUGGUGCCAGAGGGAC
AUGCAAUACCCGUCCAGGACUUUCAAGCUCUGAGUGAAAGUGCCACCAUUGUGUACAACGAACGUGAGUUCG
UAAACAGGUACCUGCACCAUAUUGCCACACAUGGAGGAGCGCUGAACACUGAUGAAGAAUAUUACAAAACUG
UCAAGCCCAGCGAGCACGACGGCGAAUACCUGUACGACAUCGACAGGAAACAGUGCGUCAAGAAAGAACUAG
UCACUGGGCUAGGGCUCACAGGCGAGCUGGUGGAUCCUCCCUUCCAUGAAUUCGCCUACGAGAGUCUGAGAA
CACGACCAGCCGCUCCUUACCAAGUACCAACCAUAGGGGUGUAUGGCGUGCCAGGAUCAGGCAAGUCUGGCA
UCAUUAAAAGCGCAGUCACCAAAAAAGAUCUAGUGGUGAGCGCCAAGAAAGAAAACUGUGCAGAAAUUAUAA
GGGACGUCAAGAAAAUGAAAGGGCUGGACGUCAAUGCCAGAACUGUGGACUCAGUGCUCUUGAAUGGAUGCA
AACACCCCGUAGAGACCCUGUAUAUUGACGAAGCUUUUGCUUGUCAUGCAGGUACUCUCAGAGCGCUCAUAG
CCAUUAUAAGACCUAAAAAGGCAGUGCUCUGCGGGGAUCCCAAACAGUGCGGUUUUUUUAACAUGAUGUGCC
UGAAAGUGCAUUUUAACCACGAGAUUUGCACACAAGUCUUCCACAAAAGCAUCUCUCGCCGUUGCACUAAAU
CUGUGACUUCGGUCGUCUCAACCUUGUUUUACGACAAAAAAAUGAGAACGACGAAUCCGAAAGAGACUAAGA
UUGUGAUUGACACUACCGGCAGUACCAAACCUAAGCAGGACGAUCUCAUUCUCACUUGUUUCAGAGGGUGGG
UGAAGCAGUUGCAAAUAGAUUACAAAGGCAACGAAAUAAUGACGGCAGCUGCCUCUCAAGGGCUGACCCGUA
AAGGUGUGUAUGCCGUUCGGUACAAGGUGAAUGAAAAUCCUCUGUACGCACCCACCUCAGAACAUGUGAACG
UCCUACUGACCCGCACGGAGGACCGCAUCGUGUGGAAAACACUAGCCGGCGACCCAUGGAUAAAAACACUGA
CUGCCAAGUACCCUGGGAAUUUCACUGCCACGAUAGAGGAGUGGCAAGCAGAGCAUGAUGCCAUCAUGAGGC
ACAUCUUGGAGAGACCGGACCCUACCGACGUCUUCCAGAAUAAGGCAAACGUGUGUUGGGCCAAGGCUUUAG
UGCCGGUGCUGAAGACCGCUGGCAUAGACAUGACCACUGAACAAUGGAACACUGUGGAUUAUUUUGAAACGG
ACAAAGCUCACUCAGCAGAGAUAGUAUUGAACCAACUAUGCGUGAGGUUCUUUGGACUCGAUCUGGACUCCG
GUCUAUUUUCUGCACCCACUGUUCCGUUAUCCAUUAGGAAUAAUCACUGGGAUAACUCCCCGUCGCCUAACA
UGUACGGGCUGAAUAAAGAAGUGGUCCGUCAGCUCUCUCGCAGGUACCCACAACUGCCUCGGGCAGUUGCCA
CUGGAAGAGUCUAUGACAUGAACACUGGUACACUGCGCAAUUAUGAUCCGCGCAUAAACCUAGUACCUGUAA
ACAGAAGACUGCCUCAUGCUUUAGUCCUCCACCAUAAUGAACACCCACAGAGUGACUUUUCUUCAUUCGUCA
GCAAAUUGAAGGGCAGAACUGUCCUGGUGGUCGGGGAAAAGUUGUCCGUCCCAGGCAAAAUGGUUGACUGGU
UGUCAGACCGGCCUGAGGCUACCUUCAGAGCUCGGCUGGAUUUAGGCAUCCCAGGUGAUGUGCCCAAAUAUG
ACAUAAUAUUUGUUAAUGUGAGGACCCCAUAUAAAUACCAUCACUAUCAGCAGUGUGAAGACCAUGCCAUUA
AGCUUAGCAUGUUGACCAAGAAAGCUUGUCUGCAUCUGAAUCCCGGCGGAACCUGUGUCAGCAUAGGUUAUG
GUUACGCUGACAGGGCCAGCGAAAGCAUCAUUGGUGCUAUAGCGCGGCAGUUCAAGUUUUCCCGGGUAUGCA
AACCGAAAUCCUCACUUGAAGAGACGGAAGUUCUGUUUGUAUUCAUUGGGUACGAUCGCAAGGCCCGUACGC
ACAAUUCUUACAAGCUUUCAUCAACCUUGACCAACAUUUAUACAGGUUCCAGACUCCACGAAGCCGGAUGUG
CACCCUCAUAUCAUGUGGUGCGAGGGGAUAUUGCCACGGCCACCGAAGGAGUGAUUAUAAAUGCUGCUAACA
GCAAAGGACAACCUGGCGGAGGGGUGUGCGGAGCGCUGUAUAAGAAAUUCCCGGAAAGCUUCGAUUUACAGC
CGAUCGAAGUAGGAAAAGCGCGACUGGUCAAAGGUGCAGCUAAACAUAUCAUUCAUGCCGUAGGACCAAACU
UCAACAAAGUUUCGGAGGUUGAAGGUGACAAACAGUUGGCAGAGGCUUAUGAGUCCAUCGCUAAGAUUGUCA
ACGAUAACAAUUACAAGUCAGUAGCGAUUCCACUGUUGUCCACCGGCAUCUUUUCCGGGAACAAAGAUCGAC
UAACCCAAUCAUUGAACCAUUUGCUGACAGCUUUAGACACCACUGAUGCAGAUGUAGCCAUAUACUGCAGGG
ACAAGAAAUGGGAAAUGACUCUCAAGGAAGCAGUGGCUAGGAGAGAAGCAGUGGAGGAGAUAUGCAUAUCCG
ACGACUCUUCAGUGACAGAACCUGAUGCAGAGCUGGUGAGGGUGCAUCCGAAGAGUUCUUUGGCUGGAAGGA
AGGGCUACAGCACAAGCGAUGGCAAAACUUUCUCAUAUUUGGAAGGGACCAAGUUUCACCAGGCGGCCAAGG
AUAUAGCAGAAAUUAAUGCCAUGUGGCCCGUUGCAACGGAGGCCAAUGAGCAGGUAUGCAUGUAUAUCCUCG
GAGAAAGCAUGAGCAGUAUUAGGUCGAAAUGCCCCGUCGAAGAGUCGGAAGCCUCCACACCACCUAGCACGC
UGCCUUGCUUGUGCAUCCAUGCCAUGACUCCAGAAAGAGUACAGCGCCUAAAAGCCUCACGUCCAGAACAAA
UUACUGUGUGCUCAUCCUUUCCAUUGCCGAAGUAUAGAAUCACUGGUGUGCAGAAGAUCCAAUGCUCCCAGC
CUAUAUUGUUCUCACCGAAAGUGCCUGCGUAUAUUCAUCCAAGGAAGUAUCUCGUGGAAACACCACCGGUAG
ACGAGACUCCGGAGCCAUCGGCAGAGAACCAAUCCACAGAGGGGACACCUGAACAACCACCACUUAUAACCG
AGGAUGAGACCAGGACUAGAACGCCUGAGCCGAUCAUCAUCGAAGAGGAAGAAGAGGAUAGCAUAAGUUUGC
UGUCAGAUGGCCCGACCCACCAGGUGCUGCAAGUCGAGGCAGACAUUCACGGGCCGCCCUCUGUAUCUAGCU
CAUCCUGGUCCAUUCCUCAUGCAUCCGACUUUGAUGUGGACAGUUUAUCCAUACUUGACACCCUGGAGGGAG
CUAGCGUGACCAGCGGGGCAACGUCAGCCGAGACUAACUCUUACUUCGCAAAGAGUAUGGAGUUUCUGGCGC
GACCGGUGCCUGCGCCUCGAACAGUAUUCAGGAACCCUCCACAUCCCGCUCCGCGCACAAGAACACCGUCAC
UUGCACCCAGCAGGGCCUGCUCGAGAACCAGCCUAGUUUCCACCCCGCCAGGCGUGAAUAGGGUGAUCACUA
GAGAGGAGCUCGAGGCGCUUACCCCGUCACGCACUCCUAGCAGGUCGGUCUCGAGAACCAGCCUGGUCUCCA
ACCCGCCAGGCGUAAAUAGGGUGAUUACAAGAGAGGAGUUUGAGGCGUUCGUAGCACAACAACAAUGACGGU
UUGAUGCGGGUGCAUACAUCUUUUCCUCCGACACCGGUCAAGGGCAUUUACAACAAAAAUCAGUAAGGCAAA
CGGUGCUAUCCGAAGUGGUGUUGGAGAGGACCGAAUUGGAGAUUUCGUAUGCCCCGCGCCUCGACCAAGAAA
AAGAAGAAUUACUACGCAAGAAAUUACAGUUAAAUCCCACACCUGCUAACAGAAGCAGAUACCAGUCCAGGA
AGGUGGAGAACAUGAAAGCCAUAACAGCUAGACGUAUUCUGCAAGGCCUAGGGCAUUAUUUGAAGGCAGAAG
GAAAAGUGGAGUGCUACCGAACCCUGCAUCCUGUUCCUUUGUAUUCAUCUAGUGUGAACCGUGCCUUUUCAA
GCCCCAAGGUCGCAGUGGAAGCCUGUAACGCCAUGUUGAAAGAGAACUUUCCGACUGUGGCUUCUUACUGUA
UUAUUCCAGAGUACGAUGCCUAUUUGGACAUGGUUGACGGAGCUUCAUGCUGCUUAGACACUGCCAGUUUUU
GCCCUGCAAAGCUGCGCAGCUUUCCAAAGAAACACUCCUAUUUGGAACCCACAAUACGAUCGGCAGUGCCUU
CAGCGAUCCAGAACACGCUCCAGAACGUCCUGGCAGCUGCCACAAAAAGAAAUUGCAAUGUCACGCAAAUGA
GAGAAUUGCCCGUAUUGGAUUCGGCGGCCUUUAAUGUGGAAUGCUUCAAGAAAUAUGCGUGUAAUAAUGAAU
AUUGGGAAACGUUUAAAGAAAACCCCAUCAGGCUUACUGAAGAAAACGUGGUAAAUUACAUUACCAAAUUAA
AAGGACCAAAAGCUGCUGCUCUUUUUGCGAAGACACAUAAUUUGAAUAUGUUGCAGGACAUACCAAUGGACA
GGUUUGUAAUGGACUUAAAGAGAGACGUGAAAGUGACUCCAGGAACAAAACAUACUGAAGAACGGCCCAAGG
UACAGGUGAUCCAGGCUGCCGAUCCGCUAGCAACAGCGUAUCUGUGCGGAAUCCACCGAGAGCUGGUUAGGA
GAUUAAAUGCGGUCCUGCUUCCGAACAUUCAUACACUGUUUGAUAUGUCGGCUGAAGACUUUGACGCUAUUA
UAGCCGAGCACUUCCAGCCUGGGGAUUGUGUUCUGGAAACUGACAUCGCGUCGUUUGAUAAAAGUGAGGACG
ACGCCAUGGCUCUGACCGCGUUAAUGAUUCUGGAAGACUUAGGUGUGGACGCAGAGCUGUUGACGCUGAUUG
AGGCGGCUUUCGGCGAAAUUUCAUCAAUACAUUUGCCCACUAAAACUAAAUUUAAAUUCGGAGCCAUGAUGA
AAUCUGGAAUGUUCCUCACACUGUUUGUGAACACAGUCAUUAACAUUGUAAUCGCAAGCAGAGUGUUGAGAG
AACGGCUAACCGGAUCACCAUGUGCAGCAUUCAUUGGAGAUGACAAUAUCGUGAAAGGAGUCAAAUCGGACA
AAUUAAUGGCAGACAGGUGCGCCACCUGGUUGAAUAUGGAAGUCAAGAUUAUAGAUGCUGUGGUGGGCGAGA
AAGCGCCUUAUUUCUGUGGAGGGUUUAUUUUGUGUGACUCCGUGACCGGCACAGCGUGCCGUGUGGCAGACC
CCCUAAAAAGGCUGUUUAAGCUUGGCAAACCUCUGGCAGCAGACGAUGAACAUGAUGAUGACAGGAGAAGGG
CAUUGCAUGAAGAGUCAACACGCUGGAACCGAGUGGGUAUUCUUUCAGAGCUGUGCAAGGCAGUAGAAUCAA
GGUAUGAAACCGUAGGAACUUCCAUCAUAGUUAUGGCCAUGACUACUCUAGCUAGCAGUGUUAAAUCAUUCA
GCUACCUGAGAGGGGCCCCUAUAACUCUCUACGGCUAACCUGAAUGGACUACGACAUAGUCUAGUCCGCCAA
GUCUAGCAUAUGGCCACC -----------------GOI-----------------
[SEQ ID No: 457]
CGGAGACGGCGCAGAAGAAGAGGAUCUGGCGAAGGCAGAGGCAGCCUGCUUACAUGUGGCGACGUGGAAGAG
AACCCCGGACCUAUGCACCAGAAACGGACCGCCAUGUUCCAGGAUCCUCAAGAGAGGCCCAGAAAGCUGCCU
CAGCUGUGUACCGAGCUGCAGACCACCAUCCACGACAUCAUCCUGGAAUGCGUGUACUGCAAGCAGCAGCUC
CUGCGGAGAGAGGUGUACGAUUUCGCCUUCCGGGACCUGUGCAUCGUGUACAGAGAUGGCAACCCCUACGCC
GUGUGCGACAAGUGCCUGAAGUUCUACAGCAAGAUCAGCGAGUACCGGCACUACUGCUACAGCCUGUACGGC
ACCACACUGGAACAGCAGUACAACAAGCCCCUGUGCGACCUGCUGAUCCGGUGCAUCAACUGCCAGAAACCU
CUGUGCCCCGAGGAAAAGCAGCGGCACCUGGACAAGAAGCAGCGGUUCCACAACAUCAGAGGCCGGUGGACC
GGCAGAUGCAUGAGCUGUUGUCGGAGCAGCAGAACCAGACGGGAAACCCAGCUGUGAGCGGCCGCGAAUUGG
CAAGCUGCUUACAUAGAACUCGCGGCGAUUGGCAUGCCGCCUUAAAAUUUUUAUUUUAUUUUUCUUUUCUUU
UCCGAAUCGGAUUUUGUUUUUAAUAUUUCAAAAAAAAAAAAAAAAAAAAAAAAAAAAAAAAAAA

[1033] Accordingly, preferably the RNA construct comprises a nucleotide sequence substantially as set out above, comprising or consisting of SEQ ID No: 92, a GOI, and SEQ ID No: 457, or a fragment or variant thereof.

[1034] In a second aspect of the invention, there is provided a nucleic acid sequence encoding the RNA construct of the first aspect.

[1035] In one embodiment, the nucleic acid sequence may encode a GOI—furin T2A—HCV E6 (which is the first viral IIP mentioned herein, but it will be appreciated that any of the IIPs or linkers disclosed herein may be used). Thus, the nucleic acid sequence may comprise or consist of SEQ ID No: 93, a GOI, and SEQ ID No: 458. SEQ ID No: 93 and SEQ ID No: 458 are as follows:

[SEQ ID No: 93]
ATGGGCGGCGCATGAGAGAAGCCCAGACCAATTACCTACCCAAAATGGAGAAAGTTCACGTTGACATCGAGG
AAGACAGCCCATTCCTCAGAGCTTTGCAGCGGAGCTTCCCGCAGTTTGAGGTAGAAGCCAAGCAGGTCACTG
ATAATGACCATGCTAATGCCAGAGCGTTTTCGCATCTGGCTTCAAAACTGATCGAAACGGAGGTGGACCCAT
CCGACACGATCCTTGACATTGGAAGTGCGCCCGCCCGCAGAATGTATTCTAAGCACAAGTATCATTGTATCT
GTCCGATGAGATGTGCGGAAGATCCGGACAGATTGTATAAGTATGCAACTAAGCTGAAGAAAAACTGTAAGG
AAATAACTGATAAGGAATTGGACAAGAAAATGAAGGAGCTGGCCGCCGTCATGAGCGACCCTGACCTGGAAA
CTGAGACTATGTGCCTCCACGACGACGAGTCGTGTCGCTACGAAGGGCAAGTCGCTGTTTACCAGGATGTAT
ACGCGGTTGACGGACCGACAAGTCTCTATCACCAAGCCAATAAGGGAGTTAGAGTCGCCTACTGGATAGGCT
TTGACACCACCCCTTTTATGTTTAAGAACTTGGCTGGAGCATATCCATCATACTCTACCAACTGGGCCGACG
AAACCGTGTTAACGGCTCGTAACATAGGCCTATGCAGCTCTGACGTTATGGAGCGGTCACGTAGAGGGATGT
CCATTCTTAGAAAGAAGTATTTGAAACCATCCAACAATGTTCTATTCTCTGTTGGCTCGACCATCTACCACG
AGAAGAGGGACTTACTGAGGAGCTGGCACCTGCCGTCTGTATTTCACTTACGTGGCAAGCAAAATTACACAT
GTCGGTGTGAGACTATAGTTAGTTGCGACGGGTACGTCGTTAAAAGAATAGCTATCAGTCCAGGCCTGTATG
GGAAGCCTTCAGGCTATGCTGCTACGATGCACCGCGAGGGATTCTTGTGCTGCAAAGTGACAGACACATTGA
ACGGGGAGAGGGTCTCTTTTCCCGTGTGCACGTATGTGCCAGCTACATTGTGTGACCAAATGACTGGCATAC
TGGCAACAGATGTCAGTGCGGACGACGCGCAAAAACTGCTGGTTGGGCTCAACCAGCGTATAGTCGTCAACG
GTCGCACCCAGAGAAACACCAATACCATGAAAAATTACCTTTTGCCCGTAGTGGCCCAGGCATTTGCTAGGT
GGGCAAAGGAATATAAGGAAGATCAAGAAGATGAAAGGCCACTAGGACTACGAGATAGACAGTTAGTCATGG
GGTGTTGTTGGGCTTTTAGAAGGCACAAGATAACATCTATTTATAAGCGCCCGGATACCCAAACCATCATCA
AAGTGAACAGCGATTTCCACTCATTCGTGCTGCCCAGGATAGGCAGTAACACATTGGAGATCGGGCTGAGAA
CAAGAATCAGGAAAATGTTAGAGGAGCACAAGGAGCCGTCACCTCTCATTACCGCCGAGGACGTACAAGAAG
CTAAGTGCGCAGCCGATGAGGCTAAGGAGGTGCGTGAAGCCGAGGAGTTGCGCGCAGCTCTACCACCTTTGG
CAGCTGATGTTGAGGAGCCCACTCTGGAAGCCGATGTCGACTTGATGTTACAAGAGGCTGGGGCCGGCTCAG
TGGAGACACCTCGTGGCTTGATAAAGGTTACCAGCTACGATGGCGAGGACAAGATCGGCTCTTACGCTGTGC
TTTCTCCGCAGGCTGTACTCAAGAGTGAAAAATTATCTTGCATCCACCCTCTCGCTGAACAAGTCATAGTGA
TAACACACTCTGGCCGAAAAGGGCGTTATGCCGTGGAACCATACCATGGTAAAGTAGTGGTGCCAGAGGGAC
ATGCAATACCCGTCCAGGACTTTCAAGCTCTGAGTGAAAGTGCCACCATTGTGTACAACGAACGTGAGTTCG
TAAACAGGTACCTGCACCATATTGCCACACATGGAGGAGCGCTGAACACTGATGAAGAATATTACAAAACTG
TCAAGCCCAGCGAGCACGACGGCGAATACCTGTACGACATCGACAGGAAACAGTGCGTCAAGAAAGAACTAG
TCACTGGGCTAGGGCTCACAGGCGAGCTGGTGGATCCTCCCTTCCATGAATTCGCCTACGAGAGTCTGAGAA
CACGACCAGCCGCTCCTTACCAAGTACCAACCATAGGGGTGTATGGCGTGCCAGGATCAGGCAAGTCTGGCA
TCATTAAAAGCGCAGTCACCAAAAAAGATCTAGTGGTGAGCGCCAAGAAAGAAAACTGTGCAGAAATTATAA
GGGACGTCAAGAAAATGAAAGGGCTGGACGTCAATGCCAGAACTGTGGACTCAGTGCTCTTGAATGGATGCA
AACACCCCGTAGAGACCCTGTATATTGACGAAGCTTTTGCTTGTCATGCAGGTACTCTCAGAGCGCTCATAG
CCATTATAAGACCTAAAAAGGCAGTGCTCTGCGGGGATCCCAAACAGTGCGGTTTTTTTAACATGATGTGCC
TGAAAGTGCATTTTAACCACGAGATTTGCACACAAGTCTTCCACAAAAGCATCTCTCGCCGTTGCACTAAAT
CTGTGACTTCGGTCGTCTCAACCTTGTTTTACGACAAAAAAATGAGAACGACGAATCCGAAAGAGACTAAGA
TTGTGATTGACACTACCGGCAGTACCAAACCTAAGCAGGACGATCTCATTCTCACTTGTTTCAGAGGGTGGG
TGAAGCAGTTGCAAATAGATTACAAAGGCAACGAAATAATGACGGCAGCTGCCTCTCAAGGGCTGACCCGTA
AAGGTGTGTATGCCGTTCGGTACAAGGTGAATGAAAATCCTCTGTACGCACCCACCTCAGAACATGTGAACG
TCCTACTGACCCGCACGGAGGACCGCATCGTGTGGAAAACACTAGCCGGCGACCCATGGATAAAAACACTGA
CTGCCAAGTACCCTGGGAATTTCACTGCCACGATAGAGGAGTGGCAAGCAGAGCATGATGCCATCATGAGGC
ACATCTTGGAGAGACCGGACCCTACCGACGTCTTCCAGAATAAGGCAAACGTGTGTTGGGCCAAGGCTTTAG
TGCCGGTGCTGAAGACCGCTGGCATAGACATGACCACTGAACAATGGAACACTGTGGATTATTTTGAAACGG
ACAAAGCTCACTCAGCAGAGATAGTATTGAACCAACTATGCGTGAGGTTCTTTGGACTCGATCTGGACTCCG
GTCTATTTTCTGCACCCACTGTTCCGTTATCCATTAGGAATAATCACTGGGATAACTCCCCGTCGCCTAACA
TGTACGGGCTGAATAAAGAAGTGGTCCGTCAGCTCTCTCGCAGGTACCCACAACTGCCTCGGGCAGTTGCCA
CTGGAAGAGTCTATGACATGAACACTGGTACACTGCGCAATTATGATCCGCGCATAAACCTAGTACCTGTAA
ACAGAAGACTGCCTCATGCTTTAGTCCTCCACCATAATGAACACCCACAGAGTGACTTTTCTTCATTCGTCA
GCAAATTGAAGGGCAGAACTGTCCTGGTGGTCGGGGAAAAGTTGTCCGTCCCAGGCAAAATGGTTGACTGGT
TGTCAGACCGGCCTGAGGCTACCTTCAGAGCTCGGCTGGATTTAGGCATCCCAGGTGATGTGCCCAAATATG
ACATAATATTTGTTAATGTGAGGACCCCATATAAATACCATCACTATCAGCAGTGTGAAGACCATGCCATTA
AGCTTAGCATGTTGACCAAGAAAGCTTGTCTGCATCTGAATCCCGGCGGAACCTGTGTCAGCATAGGTTATG
GTTACGCTGACAGGGCCAGCGAAAGCATCATTGGTGCTATAGCGCGGCAGTTCAAGTTTTCCCGGGTATGCA
AACCGAAATCCTCACTTGAAGAGACGGAAGTTCTGTTTGTATTCATTGGGTACGATCGCAAGGCCCGTACGC
ACAATTCTTACAAGCTTTCATCAACCTTGACCAACATTTATACAGGTTCCAGACTCCACGAAGCCGGATGTG
CACCCTCATATCATGTGGTGCGAGGGGATATTGCCACGGCCACCGAAGGAGTGATTATAAATGCTGCTAACA
GCAAAGGACAACCTGGCGGAGGGGTGTGCGGAGCGCTGTATAAGAAATTCCCGGAAAGCTTCGATTTACAGC
CGATCGAAGTAGGAAAAGCGCGACTGGTCAAAGGTGCAGCTAAACATATCATTCATGCCGTAGGACCAAACT
TCAACAAAGTTTCGGAGGTTGAAGGTGACAAACAGTTGGCAGAGGCTTATGAGTCCATCGCTAAGATTGTCA
ACGATAACAATTACAAGTCAGTAGCGATTCCACTGTTGTCCACCGGCATCTTTTCCGGGAACAAAGATCGAC
TAACCCAATCATTGAACCATTTGCTGACAGCTTTAGACACCACTGATGCAGATGTAGCCATATACTGCAGGG
ACAAGAAATGGGAAATGACTCTCAAGGAAGCAGTGGCTAGGAGAGAAGCAGTGGAGGAGATATGCATATCCG
ACGACTCTTCAGTGACAGAACCTGATGCAGAGCTGGTGAGGGTGCATCCGAAGAGTTCTTTGGCTGGAAGGA
AGGGCTACAGCACAAGCGATGGCAAAACTTTCTCATATTTGGAAGGGACCAAGTTTCACCAGGCGGCCAAGG
ATATAGCAGAAATTAATGCCATGTGGCCCGTTGCAACGGAGGCCAATGAGCAGGTATGCATGTATATCCTCG
GAGAAAGCATGAGCAGTATTAGGTCGAAATGCCCCGTCGAAGAGTCGGAAGCCTCCACACCACCTAGCACGC
TGCCTTGCTTGTGCATCCATGCCATGACTCCAGAAAGAGTACAGCGCCTAAAAGCCTCACGTCCAGAACAAA
TTACTGTGTGCTCATCCTTTCCATTGCCGAAGTATAGAATCACTGGTGTGCAGAAGATCCAATGCTCCCAGC
CTATATTGTTCTCACCGAAAGTGCCTGCGTATATTCATCCAAGGAAGTATCTCGTGGAAACACCACCGGTAG
ACGAGACTCCGGAGCCATCGGCAGAGAACCAATCCACAGAGGGGACACCTGAACAACCACCACTTATAACCG
AGGATGAGACCAGGACTAGAACGCCTGAGCCGATCATCATCGAAGAGGAAGAAGAGGATAGCATAAGTTTGC
TGTCAGATGGCCCGACCCACCAGGTGCTGCAAGTCGAGGCAGACATTCACGGGCCGCCCTCTGTATCTAGCT
CATCCTGGTCCATTCCTCATGCATCCGACTTTGATGTGGACAGTTTATCCATACTTGACACCCTGGAGGGAG
CTAGCGTGACCAGCGGGGCAACGTCAGCCGAGACTAACTCTTACCTCGCAAAGAGTATGGAGTTTCTGGCGC
GACCGGTGCCTGCGCCTCGAACAGTATTCAGGAACCCTCCACATCCCGCTCCGCGCACAAGAACACCGTCAC
TTGCACCCAGCAGGGCCTGCTCGAGAACCAGCCTAGTTTCCACCCCGCCAGGCGTGAATAGGGTGATCACTA
GAGAGGAGCTCGAGGCGCTTACCCCGTCACGCACTCCTAGCAGGTCGGTCTCGAGAACCAGCCTGGTCTCCA
ACCCGCCAGGCGTAAATAGGGTGATTACAAGAGAGGAGTTTGAGGCGTTCGTAGCACAACAACAATGACGGT
TTGATGCGGGTGCATACATCTTTTCCTCCGACACCGGTCAAGGGCATTTACAACAAAAATCAGTAAGGCAAA
CGGTGCTATCCGAAGTGGTGTTGGAGAGGACCGAATTGGAGATTTCGTATGCCCCGCGCCTCGACCAAGAAA
AAGAAGAATTACTACGCAAGAAATTACAGTTAAATCCCACACCTGCTAACAGAAGCAGATACCAGTCCAGGA
AGGTGGAGAACATGAAAGCCATAACAGCTAGACGTATTCTGCAAGGCCTAGGGCATTATTTGAAGGCAGAAG
GAAAAGTGGAGTGCTACCGAACCCTGCATCCTGTTCCTTTGTATTCATCTAGTGTGAACCGTGCCTTTTCAA
GCCCCAAGGTCGCAGTGGAAGCCTGTAACGCCATGTTGAAAGAGAACTTTCCGACTGTGGCTTCTTACTGTA
TTATTCCAGAGTACGATGCCTATTTGGACATGGTTGACGGAGCTTCATGCTGCTTAGACACTGCCAGTTTTT
GCCCTGCAAAGCTGCGCAGCTTTCCAAAGAAACACTCCTATTTGGAACCCACAATACGATCGGCAGTGCCTT
CAGCGATCCAGAACACGCTCCAGAACGTCCTGGCAGCTGCCACAAAAAGAAATTGCAATGTCACGCAAATGA
GAGAATTGCCCGTATTGGATTCGGCGGCCTTTAATGTGGAATGCTTCAAGAAATATGCGTGTAATAATGAAT
ATTGGGAAACGTTTAAAGAAAACCCCATCAGGCTTACTGAAGAAAACGTGGTAAATTACATTACCAAATTAA
AAGGACCAAAAGCTGCTGCTCTTTTTGCGAAGACACATAATTTGAATATGTTGCAGGACATACCAATGGACA
GGTTTGTAATGGACTTAAAGAGAGACGTGAAAGTGACTCCAGGAACAAAACATACTGAAGAACGGCCCAAGG
TACAGGTGATCCAGGCTGCCGATCCGCTAGCAACAGCGTATCTGTGCGGAATCCACCGAGAGCTGGTTAGGA
GATTAAATGCGGTCCTGCTTCCGAACATTCATACACTGTTTGATATGTCGGCTGAAGACTTTGACGCTATTA
TAGCCGAGCACTTCCAGCCTGGGGATTGTGTTCTGGAAACTGACATCGCGTCGTTTGATAAAAGTGAGGACG
ACGCCATGGCTCTGACCGCGTTAATGATTCTGGAAGACTTAGGTGTGGACGCAGAGCTGTTGACGCTGATTG
AGGCGGCTTTCGGCGAAATTTCATCAATACATTTGCCCACTAAAACTAAATTTAAATTCGGAGCCATGATGA
AATCTGGAATGTTCCTCACACTGTTTGTGAACACAGTCATTAACATTGTAATCGCAAGCAGAGTGTTGAGAG
AACGGCTAACCGGATCACCATGTGCAGCATTCATTGGAGATGACAATATCGTGAAAGGAGTCAAATCGGACA
AATTAATGGCAGACAGGTGCGCCACCTGGTTGAATATGGAAGTCAAGATTATAGATGCTGTGGTGGGCGAGA
AAGCGCCTTATTTCTGTGGAGGGTTTATTTTGTGTGACTCCGTGACCGGCACAGCGTGCCGTGTGGCAGACC
CCCTAAAAAGGCTGTTTAAGCTTGGCAAACCTCTGGCAGCAGACGATGAACATGATGATGACAGGAGAAGGG
CATTGCATGAAGAGTCAACACGCTGGAACCGAGTGGGTATTCTTTCAGAGCTGTGCAAGGCAGTAGAATCAA
GGTATGAAACCGTAGGAACTTCCATCATAGTTATGGCCATGACTACTCTAGCTAGCAGTGTTAAATCATTCA
GCTACCTGAGAGGGGCCCCTATAACTCTCTACGGCTAACCTGAATGGACTACGACATAGTCTAGTCCGCCAA
GTCTAGCATATGGCCACC ----------------GOI-------------------
[SEQ ID No: 458]
CGGAGACGGCGCAGAAGAAGAGGATCTGGCGAAGGCAGAGGCAGCCTGCTTACATGTGGCGACGTGGAAGAG
AACCCCGGACCTATGCACCAGAAACGGACCGCCATGTTCCAGGATCCTCAAGAGAGGCCCAGAAAGCTGCCT
CAGCTGTGTACCGAGCTGCAGACCACCATCCACGACATCATCCTGGAATGCGTGTACTGCAAGCAGCAGCTC
CTGCGGAGAGAGGTGTACGATTTCGCCTTCCGGGACCTGTGCATCGTGTACAGAGATGGCAACCCCTACGCC
GTGTGCGACAAGTGCCTGAAGTTCTACAGCAAGATCAGCGAGTACCGGCACTACTGCTACAGCCTGTACGGC
ACCACACTGGAACAGCAGTACAACAAGCCCCTGTGCGACCTGCTGATCCGGTGCATCAACTGCCAGAAACCT
CTGTGCCCCGAGGAAAAGCAGCGGCACCTGGACAAGAAGCAGCGGTTCCACAACATCAGAGGCCGGTGGACC
GGCAGATGCATGAGCTGTTGTCGGAGCAGCAGAACCAGACGGGAAACCCAGCTGTGAGCGGCCGCGAATTGG
CAAGCTGCTTACATAGAACTCGCGGCGATTGGCATGCCGCCTTAAAATTTTTATTTTATTTTTCTTTTCTTT
TCCGAATCGGATTTTGTTTTTAATATTTCAAAAAAAAAAAAAAAAAAAAAAAAAAAAAAAAAAA

[1036] Accordingly, preferably the nucleic acid sequence comprises a nucleotide sequence substantially as set out above, comprising or consisting of SEQ ID No: 93, a GOI, and SEQ ID No: 458, or a fragment or variant thereof.

[1037] In a third aspect, there is provided an expression cassette comprising a nucleic acid sequence according to the second aspect.

[1038] The nucleic acid sequences of the invention are preferably harboured in a recombinant vector, for example a recombinant vector for delivery into a host cell of interest to enable production of the RNA construct.

[1039] Accordingly, in a fourth aspect, there is provided a recombinant vector comprising the expression cassette according to the third aspect.

[1040] In one embodiment, the vector may comprise a DNA sequence which encodes or comprises an saRNA plasmid construct harbouring a GOI—furin T2A—HCV E6 (which is the first viral IIP mentioned herein, but it will be appreciated that any of the IIPs or linkers disclosed herein may be used). Therefore, the vector may comprise the nucleic acid sequence of SEQ ID No: 94, a GOI, and the nucleic acid sequence of SEQ ID No: 459, in a single vector. SEQ ID No: 94 and SEQ ID No: 459 are as follows, where “GOI” represents the position of the therapeutic biomolecule encoding sequence:

[SEQ ID No: 94]
TAATACGACTCACTATAGATGGGCGGCGCATGAGAGAAGCCCAGACCAATTACCTACCCAAAATGGAGAAAG
TTCACGTTGACATCGAGGAAGACAGCCCATTCCTCAGAGCTTTGCAGCGGAGCTTCCCGCAGTTTGAGGTAG
AAGCCAAGCAGGTCACTGATAATGACCATGCTAATGCCAGAGCGTTTTCGCATCTGGCTTCAAAACTGATCG
AAACGGAGGTGGACCCATCCGACACGATCCTTGACATTGGAAGTGCGCCCGCCCGCAGAATGTATTCTAAGC
ACAAGTATCATTGTATCTGTCCGATGAGATGTGCGGAAGATCCGGACAGATTGTATAAGTATGCAACTAAGC
TGAAGAAAAACTGTAAGGAAATAACTGATAAGGAATTGGACAAGAAAATGAAGGAGCTGGCCGCCGTCATGA
GCGACCCTGACCTGGAAACTGAGACTATGTGCCTCCACGACGACGAGTCGTGTCGCTACGAAGGGCAAGTCG
CTGTTTACCAGGATGTATACGCGGTTGACGGACCGACAAGTCTCTATCACCAAGCCAATAAGGGAGTTAGAG
TCGCCTACTGGATAGGCTTTGACACCACCCCTTTTATGTTTAAGAACTTGGCTGGAGCATATCCATCATACT
CTACCAACTGGGCCGACGAAACCGTGTTAACGGCTCGTAACATAGGCCTATGCAGCTCTGACGTTATGGAGC
GGTCACGTAGAGGGATGTCCATTCTTAGAAAGAAGTATTTGAAACCATCCAACAATGTTCTATTCTCTGTTG
GCTCGACCATCTACCACGAGAAGAGGGACTTACTGAGGAGCTGGCACCTGCCGTCTGTATTTCACTTACGTG
GCAAGCAAAATTACACATGTCGGTGTGAGACTATAGTTAGTTGCGACGGGTACGTCGTTAAAAGAATAGCTA
TCAGTCCAGGCCTGTATGGGAAGCCTTCAGGCTATGCTGCTACGATGCACCGCGAGGGATTCTTGTGCTGCA
AAGTGACAGACACATTGAACGGGGAGAGGGTCTCTTTTCCCGTGTGCACGTATGTGCCAGCTACATTGTGTG
ACCAAATGACTGGCATACTGGCAACAGATGTCAGTGCGGACGACGCGCAAAAACTGCTGGTTGGGCTCAACC
AGCGTATAGTCGTCAACGGTCGCACCCAGAGAAACACCAATACCATGAAAAATTACCTTTTGCCCGTAGTGG
CCCAGGCATTTGCTAGGTGGGCAAAGGAATATAAGGAAGATCAAGAAGATGAAAGGCCACTAGGACTACGAG
ATAGACAGTTAGTCATGGGGTGTTGTTGGGCTTTTAGAAGGCACAAGATAACATCTATTTATAAGCGCCCGG
ATACCCAAACCATCATCAAAGTGAACAGCGATTTCCACTCATTCGTGCTGCCCAGGATAGGCAGTAACACAT
TGGAGATCGGGCTGAGAACAAGAATCAGGAAAATGTTAGAGGAGCACAAGGAGCCGTCACCTCTCATTACCG
CCGAGGACGTACAAGAAGCTAAGTGCGCAGCCGATGAGGCTAAGGAGGTGCGTGAAGCCGAGGAGTTGCGCG
CAGCTCTACCACCTTTGGCAGCTGATGTTGAGGAGCCCACTCTGGAAGCCGATGTCGACTTGATGTTACAAG
AGGCTGGGGCCGGCTCAGTGGAGACACCTCGTGGCTTGATAAAGGTTACCAGCTACGATGGCGAGGACAAGA
TCGGCTCTTACGCTGTGCTTTCTCCGCAGGCTGTACTCAAGAGTGAAAAATTATCTTGCATCCACCCTCTCG
CTGAACAAGTCATAGTGATAACACACTCTGGCCGAAAAGGGCGTTATGCCGTGGAACCATACCATGGTAAAG
TAGTGGTGCCAGAGGGACATGCAATACCCGTCCAGGACTTTCAAGCTCTGAGTGAAAGTGCCACCATTGTGT
ACAACGAACGTGAGTTCGTAAACAGGTACCTGCACCATATTGCCACACATGGAGGAGCGCTGAACACTGATG
AAGAATATTACAAAACTGTCAAGCCCAGCGAGCACGACGGCGAATACCTGTACGACATCGACAGGAAACAGT
GCGTCAAGAAAGAACTAGTCACTGGGCTAGGGCTCACAGGCGAGCTGGTGGATCCTCCCTTCCATGAATTCG
CCTACGAGAGTCTGAGAACACGACCAGCCGCTCCTTACCAAGTACCAACCATAGGGGTGTATGGCGTGCCAG
GATCAGGCAAGTCTGGCATCATTAAAAGCGCAGTCACCAAAAAAGATCTAGTGGTGAGCGCCAAGAAAGAAA
ACTGTGCAGAAATTATAAGGGACGTCAAGAAAATGAAAGGGCTGGACGTCAATGCCAGAACTGTGGACTCAG
TGCTCTTGAATGGATGCAAACACCCCGTAGAGACCCTGTATATTGACGAAGCTTTTGCTTGTCATGCAGGTA
CTCTCAGAGCGCTCATAGCCATTATAAGACCTAAAAAGGCAGTGCTCTGCGGGGATCCCAAACAGTGCGGTT
TTTTTAACATGATGTGCCTGAAAGTGCATTTTAACCACGAGATTTGCACACAAGTCTTCCACAAAAGCATCT
CTCGCCGTTGCACTAAATCTGTGACTTCGGTCGTCTCAACCTTGTTTTACGACAAAAAAATGAGAACGACGA
ATCCGAAAGAGACTAAGATTGTGATTGACACTACCGGCAGTACCAAACCTAAGCAGGACGATCTCATTCTCA
CTTGTTTCAGAGGGTGGGTGAAGCAGTTGCAAATAGATTACAAAGGCAACGAAATAATGACGGCAGCTGCCT
CTCAAGGGCTGACCCGTAAAGGTGTGTATGCCGTTCGGTACAAGGTGAATGAAAATCCTCTGTACGCACCCA
CCTCAGAACATGTGAACGTCCTACTGACCCGCACGGAGGACCGCATCGTGTGGAAAACACTAGCCGGCGACC
CATGGATAAAAACACTGACTGCCAAGTACCCTGGGAATTTCACTGCCACGATAGAGGAGTGGCAAGCAGAGC
ATGATGCCATCATGAGGCACATCTTGGAGAGACCGGACCCTACCGACGTCTTCCAGAATAAGGCAAACGTGT
GTTGGGCCAAGGCTTTAGTGCCGGTGCTGAAGACCGCTGGCATAGACATGACCACTGAACAATGGAACACTG
TGGATTATTTTGAAACGGACAAAGCTCACTCAGCAGAGATAGTATTGAACCAACTATGCGTGAGGTTCTTTG
GACTCGATCTGGACTCCGGTCTATTTTCTGCACCCACTGTTCCGTTATCCATTAGGAATAATCACTGGGATA
ACTCCCCGTCGCCTAACATGTACGGGCTGAATAAAGAAGTGGTCCGTCAGCTCTCTCGCAGGTACCCACAAC
TGCCTCGGGCAGTTGCCACTGGAAGAGTCTATGACATGAACACTGGTACACTGCGCAATTATGATCCGCGCA
TAAACCTAGTACCTGTAAACAGAAGACTGCCTCATGCTTTAGTCCTCCACCATAATGAACACCCACAGAGTG
ACTTTTCTTCATTCGTCAGCAAATTGAAGGGCAGAACTGTCCTGGTGGTCGGGGAAAAGTTGTCCGTCCCAG
GCAAAATGGTTGACTGGTTGTCAGACCGGCCTGAGGCTACCTTCAGAGCTCGGCTGGATTTAGGCATCCCAG
GTGATGTGCCCAAATATGACATAATATTTGTTAATGTGAGGACCCCATATAAATACCATCACTATCAGCAGT
GTGAAGACCATGCCATTAAGCTTAGCATGTTGACCAAGAAAGCTTGTCTGCATCTGAATCCCGGCGGAACCT
GTGTCAGCATAGGTTATGGTTACGCTGACAGGGCCAGCGAAAGCATCATTGGTGCTATAGCGCGGCAGTTCA
AGTTTTCCCGGGTATGCAAACCGAAATCCTCACTTGAAGAGACGGAAGTTCTGTTTGTATTCATTGGGTACG
ATCGCAAGGCCCGTACGCACAATTCTTACAAGCTTTCATCAACCTTGACCAACATTTATACAGGTTCCAGAC
TCCACGAAGCCGGATGTGCACCCTCATATCATGTGGTGCGAGGGGATATTGCCACGGCCACCGAAGGAGTGA
TTATAAATGCTGCTAACAGCAAAGGACAACCTGGCGGAGGGGTGTGCGGAGCGCTGTATAAGAAATTCCCGG
AAAGCTTCGATTTACAGCCGATCGAAGTAGGAAAAGCGCGACTGGTCAAAGGTGCAGCTAAACATATCATTC
ATGCCGTAGGACCAAACTTCAACAAAGTTTCGGAGGTTGAAGGTGACAAACAGTTGGCAGAGGCTTATGAGT
CCATCGCTAAGATTGTCAACGATAACAATTACAAGTCAGTAGCGATTCCACTGTTGTCCACCGGCATCTTTT
CCGGGAACAAAGATCGACTAACCCAATCATTGAACCATTTGCTGACAGCTTTAGACACCACTGATGCAGATG
TAGCCATATACTGCAGGGACAAGAAATGGGAAATGACTCTCAAGGAAGCAGTGGCTAGGAGAGAAGCAGTGG
AGGAGATATGCATATCCGACGACTCTTCAGTGACAGAACCTGATGCAGAGCTGGTGAGGGTGCATCCGAAGA
GTTCTTTGGCTGGAAGGAAGGGCTACAGCACAAGCGATGGCAAAACTTTCTCATATTTGGAAGGGACCAAGT
TTCACCAGGCGGCCAAGGATATAGCAGAAATTAATGCCATGTGGCCCGTTGCAACGGAGGCCAATGAGCAGG
TATGCATGTATATCCTCGGAGAAAGCATGAGCAGTATTAGGTCGAAATGCCCCGTCGAAGAGTCGGAAGCCT
CCACACCACCTAGCACGCTGCCTTGCTTGTGCATCCATGCCATGACTCCAGAAAGAGTACAGCGCCTAAAAG
CCTCACGTCCAGAACAAATTACTGTGTGCTCATCCTTTCCATTGCCGAAGTATAGAATCACTGGTGTGCAGA
AGATCCAATGCTCCCAGCCTATATTGTTCTCACCGAAAGTGCCTGCGTATATTCATCCAAGGAAGTATCTCG
TGGAAACACCACCGGTAGACGAGACTCCGGAGCCATCGGCAGAGAACCAATCCACAGAGGGGACACCTGAAC
AACCACCACTTATAACCGAGGATGAGACCAGGACTAGAACGCCTGAGCCGATCATCATCGAAGAGGAAGAAG
AGGATAGCATAAGTTTGCTGTCAGATGGCCCGACCCACCAGGTGCTGCAAGTCGAGGCAGACATTCACGGGC
CGCCCTCTGTATCTAGCTCATCCTGGTCCATTCCTCATGCATCCGACTTTGATGTGGACAGTTTATCCATAC
TTGACACCCTGGAGGGAGCTAGCGTGACCAGCGGGGCAACGTCAGCCGAGACTAACTCTTACTTCGCAAAGA
GTATGGAGTTTCTGGCGCGACCGGTGCCTGCGCCTCGAACAGTATTCAGGAACCCTCCACATCCCGCTCCGC
GCACAAGAACACCGTCACTTGCACCCAGCAGGGCCTGCTCGAGAACCAGCCTAGTTTCCACCCCGCCAGGCG
TGAATAGGGTGATCACTAGAGAGGAGCTCGAGGCGCTTACCCCGTCACGCACTCCTAGCAGGTCGGTCTCGA
GAACCAGCCTGGTCTCCAACCCGCCAGGCGTAAATAGGGTGATTACAAGAGAGGAGTTTGAGGCGTTCGTAG
CACAACAACAATGACGGTTTGATGCGGGTGCATACATCTTTTCCTCCGACACCGGTCAAGGGCATTTACAAC
AAAAATCAGTAAGGCAAACGGTGCTATCCGAAGTGGTGTTGGAGAGGACCGAATTGGAGATTTCGTATGCCC
CGCGCCTCGACCAAGAAAAAGAAGAATTACTACGCAAGAAATTACAGTTAAATCCCACACCTGCTAACAGAA
GCAGATACCAGTCCAGGAAGGTGGAGAACATGAAAGCCATAACAGCTAGACGTATTCTGCAAGGCCTAGGGC
ATTATTTGAAGGCAGAAGGAAAAGTGGAGTGCTACCGAACCCTGCATCCTGTTCCTTTGTATTCATCTAGTG
TGAACCGTGCCTTTTCAAGCCCCAAGGTCGCAGTGGAAGCCTGTAACGCCATGTTGAAAGAGAACTTTCCGA
CTGTGGCTTCTTACTGTATTATTCCAGAGTACGATGCCTATTTGGACATGGTTGACGGAGCTTCATGCTGCT
TAGACACTGCCAGTTTTTGCCCTGCAAAGCTGCGCAGCTTTCCAAAGAAACACTCCTATTTGGAACCCACAA
TACGATCGGCAGTGCCTTCAGCGATCCAGAACACGCTCCAGAACGTCCTGGCAGCTGCCACAAAAAGAAATT
GCAATGTCACGCAAATGAGAGAATTGCCCGTATTGGATTCGGCGGCCTTTAATGTGGAATGCTTCAAGAAAT
ATGCGTGTAATAATGAATATTGGGAAACGTTTAAAGAAAACCCCATCAGGCTTACTGAAGAAAACGTGGTAA
ATTACATTACCAAATTAAAAGGACCAAAAGCTGCTGCTCTTTTTGCGAAGACACATAATTTGAATATGTTGC
AGGACATACCAATGGACAGGTTTGTAATGGACTTAAAGAGAGACGTGAAAGTGACTCCAGGAACAAAACATA
CTGAAGAACGGCCCAAGGTACAGGTGATCCAGGCTGCCGATCCGCTAGCAACAGCGTATCTGTGCGGAATCC
ACCGAGAGCTGGTTAGGAGATTAAATGCGGTCCTGCTTCCGAACATTCATACACTGTTTGATATGTCGGCTG
AAGACTTTGACGCTATTATAGCCGAGCACTTCCAGCCTGGGGATTGTGTTCTGGAAACTGACATCGCGTCGT
TTGATAAAAGTGAGGACGACGCCATGGCTCTGACCGCGTTAATGATTCTGGAAGACTTAGGTGTGGACGCAG
AGCTGTTGACGCTGATTGAGGCGGCTTTCGGCGAAATTTCATCAATACATTTGCCCACTAAAACTAAATTTA
AATTCGGAGCCATGATGAAATCTGGAATGTTCCTCACACTGTTTGTGAACACAGTCATTAACATTGTAATCG
CAAGCAGAGTGTTGAGAGAACGGCTAACCGGATCACCATGTGCAGCATTCATTGGAGATGACAATATCGTGA
AAGGAGTCAAATCGGACAAATTAATGGCAGACAGGTGCGCCACCTGGTTGAATATGGAAGTCAAGATTATAG
ATGCTGTGGTGGGCGAGAAAGCGCCTTATTTCTGTGGAGGGTTTATTTTGTGTGACTCCGTGACCGGCACAG
CGTGCCGTGTGGCAGACCCCCTAAAAAGGCTGTTTAAGCTTGGCAAACCTCTGGCAGCAGACGATGAACATG
ATGATGACAGGAGAAGGGCATTGCATGAAGAGTCAACACGCTGGAACCGAGTGGGTATTCTTTCAGAGCTGT
GCAAGGCAGTAGAATCAAGGTATGAAACCGTAGGAACTTCCATCATAGTTATGGCCATGACTACTCTAGCTA
GCAGTGTTAAATCATTCAGCTACCTGAGAGGGGCCCCTATAACTCTCTACGGCTAACCTGAATGGACTACGA
CATAGTCTAGTCCGCCAAGTCTAGCATATGGCCACC---------GOI---------
[SEQ ID No: 459]
CGGAGACGGCGCAGAAGAAGAGGATCTGGCGAAGGCAGAGGCAGCCTGCTTACATGTGGCGACGTGGAAGAG
AACCCCGGACCTATGCACCAGAAACGGACCGCCATGTTCCAGGATCCTCAAGAGAGGCCCAGAAAGCTGCCT
CAGCTGTGTACCGAGCTGCAGACCACCATCCACGACATCATCCTGGAATGCGTGTACTGCAAGCAGCAGCTC
CTGCGGAGAGAGGTGTACGATTTCGCCTTCCGGGACCTGTGCATCGTGTACAGAGATGGCAACCCCTACGCC
GTGTGCGACAAGTGCCTGAAGTTCTACAGCAAGATCAGCGAGTACCGGCACTACTGCTACAGCCTGTACGGC
ACCACACTGGAACAGCAGTACAACAAGCCCCTGTGCGACCTGCTGATCCGGTGCATCAACTGCCAGAAACCT
CTGTGCCCCGAGGAAAAGCAGCGGCACCTGGACAAGAAGCAGCGGTTCCACAACATCAGAGGCCGGTGGACC
GGCAGATGCATGAGCTGTTGTCGGAGCAGCAGAACCAGACGGGAAACCCAGCTGTGAGCGGCCGCGAATTGG
CAAGCTGCTTACATAGAACTCGCGGCGATTGGCATGCCGCCTTAAAATTTTTATTTTATTTTTCTTTTCTTT
TCCGAATCGGATTTTGTTTTTAATATTTCAAAAAAAAAAAAAAAAAAAAAAAAAAAAAAAAAAACGCGTCGA
GGGGAATTAATTCTTGAAGACGAAAGGGCCAGGTGGCACTTTTCGGGGAAATGTGCGCGGAACCCCTATTTG
TTTATTTTTCTAAATACATTCAAATATGTATCCGCTCATGAGACAATAACCCTGATAAATGCTTCAATAATA
TTGAAAAAGGAAGAGTATGAGTATTCAACATTTCCGTGTCGCCCTTATTCCCTTTTTTGCGGCATTTTGCCT
TCCTGTTTTTGCTCACCCAGAAACGCTGGTGAAAGTAAAAGATGCTGAAGATCAGTTGGGTGCACGAGTGGG
TTACATCGAACTGGATCTCAACAGCGGTAAGATCCTTGAGAGTTTTCGCCCCGAAGAACGTTTTCCAATGAT
GAGCACTTTTAAAGTTCTGCTATGTGGCGCGGTATTATCCCGTGTTGACGCCGGGCAAGAGCAACTCGGTCG
CCGCATACACTATTCTCAGAATGACTTGGTTGAGTACTCACCAGTCACAGAAAAGCATCTTACGGATGGCAT
GACAGTAAGAGAATTATGCAGTGCTGCCATAACCATGAGTGATAACACTGCGGCCAACTTACTTCTGACAAC
GATCGGAGGACCGAAGGAGCTAACCGCTTTTTTGCACAACATGGGGGATCATGTAACTCGCCTTGATCGTTG
GGAACCGGAGCTGAATGAAGCCATACCAAACGACGAGCGTGACACCACGATGCCTGTAGCAATGGCAACAAC
GTTGCGCAAACTATTAACTGGCGAACTACTTACTCTAGCTTCCCGGCAACAATTAATAGACTGGATGGAGGC
GGATAAAGTTGCAGGACCACTTCTGCGCTCGGCCCTTCCGGCTGGCTGGTTTATTGCTGATAAATCTGGAGC
CGGTGAGCGTGGGTCTCGCGGTATCATTGCAGCACTGGGGCCAGATGGTAAGCCCTCCCGTATCGTAGTTAT
CTACACGACGGGGAGTCAGGCAACTATGGATGAACGAAATAGACAGATCGCTGAGATAGGTGCCTCACTGAT
TAAGCATTGGTAACTGTCAGACCAAGTTTACTCATATATACTTTAGATTGATTTAAAACTTCATTTTTAATT
TAAAAGGATCTAGGTGAAGATCCTTTTTGATAATCTCATGACCAAAATCCCTTAACGTGAGTTTTCGTTCCA
CTGAGCGTCAGACCCCGTAGAAAAGATCAAAGGATCTTCTTGAGATCCTTTTTTTCTGCGCGTAATCTGCTG
CTTGCAAACAAAAAAACCACCGCTACCAGCGGTGGTTTGTTTGCCGGATCAAGAGCTACCAACTCTTTTTCC
GAAGGTAACTGGCTTCAGCAGAGCGCAGATACCAAATACTGTCCTTCTAGTGTAGCCGTAGTTAGGCCACCA
CTTCAAGAACTCTGTAGCACCGCCTACATACCTCGCTCTGCTAATCCTGTTACCAGTGGCTGCTGCCAGTGG
CGATAAGTCGTGTCTTACCGGGTTGGACTCAAGACGATAGTTACCGGATAAGGCGCAGCGGTCGGGCTGAAC
GGGGGGTTCGTGCACACAGCCCAGCTTGGAGCGAACGACCTACACCGAACTGAGATACCTACAGCGTGAGCA
TTGAGAAAGCGCCACGCTTCCCGAAGGGAGAAAGGCGGACAGGTATCCGGTAAGCGGCAGGGTCGGAACAGG
AGAGCGCACGAGGGAGCTTCCAGGGGGAAACGCCTGGTATCTTTATAGTCCTGTCGGGTTTCGCCACCTCTG
ACTTGAGCGTCGATTTTTGTGATGCTCGTCAGGGGGGCGGAGCCTATGGAAAAACGCCAGCAACGCGAGCTC

[1041] Accordingly, preferably the vector comprises the nucleotide sequence substantially as set out above, comprising or consisting of SEQ ID NO: 94, a GOI, and SEQ ID No: 459, or a variant or fragment thereof.

[1042] The saRNA constructs of the invention may be made using a DNA plasmid, as a template. RNA copies may then be made by in vitro transcription using a polymerase, such as T7 polymerase, and the T7 promoter may be upstream of the saRNA. Hence, the saRNA constructs of the invention may be made using the DNA plasmid having a nucleic acid sequence substantially as set out above, comprising or consisting of SEQ ID No: 94, a GOI, and SEQ ID No: 459, or a variant or fragment thereof, as the template. Of course, it will be appreciated that other RNA polymerases could be used instead of T7 polymerase, for example the SP6 or the T3 polymerase, in which case the saRNA construct may comprise the SP6 or T3 promoter instead.

[1043] The vector of the fourth aspect encoding the RNA construct of the first aspect may for example be a plasmid, cosmid or phage and/or be a viral vector. Such recombinant vectors are highly useful in the delivery systems of the invention for transforming cells with the nucleotide sequences. The nucleotide sequences may preferably be a DNA sequence, and it is this DNA sequence which encodes the RNA sequence forming the RNA construct of the first aspect.

[1044] Recombinant vectors encoding the RNA construct of the first aspect may also include other functional elements. For example, they may further comprise a variety of other functional elements including a suitable promoter for initiating transgene expression upon introduction of the vector in a host cell. For instance, the vector is preferably capable of autonomously replicating in the nucleus of the host cell, such as a bacterial cell. In this case, elements which induce or regulate DNA replication may be required in the recombinant vector. Alternatively, the recombinant vector may be designed such that it integrates into the genome of a host cell. In this case, DNA sequences which favour targeted integration (e.g. by homologous recombination) are envisaged. Suitable promoters may include the SV40 promoter, CMV, EF1a, PGK, viral long terminal repeats, as well as inducible promoters, such as the Tetracycline inducible system, as examples. The cassette or vector may also comprise a terminator, such as the Beta globin, SV40 polyadenylation sequences or synthetic polyadenylation sequences. The recombinant vector may also comprise a promoter or regulator or enhancer to control expression of the nucleic acid as required.

[1045] The vector may also comprise DNA coding for a gene that may be used as a selectable marker in the cloning process, i.e. to enable selection of cells that have been transfected or transformed, and to enable the selection of cells harbouring vectors incorporating heterologous DNA. For example, ampicillin, neomycin, puromycin or chloramphenicol resistance is envisaged. Alternatively, the selectable marker gene may be in a different vector to be used simultaneously with the vector containing the transgene(s). The cassette or vector may also comprise DNA involved with regulating expression of the nucleotide sequence, or for targeting the expressed polypeptide to a certain part of the host cell.

[1046] Purified vector may be inserted directly into a host cell by suitable means, e.g. direct endocytotic uptake. The vector may be introduced directly into a host cell (e.g. a eukaryotic or prokaryotic cell) by transfection, infection, electroporation, microinjection, cell fusion, protoplast fusion or ballistic bombardment. Alternatively, vectors of the invention may be introduced directly into a host cell using a particle gun.

[1047] The nucleic acid molecule may (but not necessarily) be one, which becomes incorporated in the DNA of the host cell. Undifferentiated cells may be stably transformed leading to the production of genetically modified daughter cells (in which case regulation of expression in the subject may be required e.g. with specific transcription factors or gene activators). Alternatively, the delivery system may be designed to favour unstable or transient transformation of differentiated cells. When this is the case, regulation of expression may be less important because expression of the DNA molecule will stop when the transformed cells die or stop expressing the protein.

[1048] Alternatively, the delivery system may provide the nucleic acid molecule to the host cell without it being incorporated in a vector. For instance, the nucleic acid molecule may be incorporated within a liposome or virus particle. Alternatively a “naked” nucleic acid molecule may be inserted into a host cell by a suitable means e.g. direct endocytotic uptake.

[1049] In a fifth aspect, there is provided a pharmaceutical composition comprising the RNA construct of the first aspect, the nucleic acid sequence of the second aspect, the expression cassette of the third aspect or the vector of the fourth aspect, and a pharmaceutically acceptable vehicle.

[1050] In a sixth aspect, there is provided a process for making the pharmaceutical composition according to the fifth aspect, the method comprising contacting the RNA construct of the first aspect, the nucleic acid sequence of the second aspect, the expression cassette of the third aspect or the vector of the fourth aspect, with a pharmaceutically acceptable vehicle.

[1051] In a seventh aspect, there is provided a method of preparing the RNA construct of the first aspect, the method comprising:
[1052] a) i) introducing, into a host cell, the vector of the fourth aspect; and
   [1053] ii) culturing the host cell under conditions to result in the production of the RNA construct of the first aspect; or
[1054] b) transcribing the RNA construct from the vector according to the fourth aspect.

[1055] The host cell of step a) may be a eukaryotic or prokaryotic host cell. Preferably, the host cell is a eukaryotic host cell. More preferably, the host cell is a mammalian host cell such as Human embryonic kidney 293 cells or Chinese hamster ovary (CHO) cells. Step (b) may be performed in vitro or in vivo, preferably in vitro.

[1056] Suitable methods of in vitro transcription are well known in the art and would be known to those skilled in the art. For example, as described in Molecular Cloning, A Laboratory Manual, 2nd edition. (1989) editor C Nolan, Cold Spring Harbor Laboratory Press.

[1057] The RNA replicon of the first aspect is particularly suitable for therapy.

[1058] While the inventors envisaged that the RNA construct of the first aspect would be generated by in vitro transcription for in vivo use in therapy, those experienced in the art will recognise that the RNA construct can be generated in vivo in a subject for therapy, by in vivo delivery of the nucleic acid according to the second aspect, the expression cassette according to the third aspect, or the vector according to the fourth aspect to a subject.

[1059] Hence, according to an eighth aspect, there is provided a RNA construct according to the first aspect, the nucleic acid according to the second aspect, the expression cassette according to the third aspect, the vector according to the fourth aspect or the pharmaceutical composition according to the fifth aspect, for use as a medicament or in therapy.

[1060] In a ninth aspect of the invention, there is provided a RNA construct according to the first aspect, the nucleic acid according to the second aspect, the expression cassette according to the third aspect, the vector according to the fourth aspect or the pharmaceutical composition according to the fifth aspect, for use in the prevention, amelioration or treatment of a protozoan, fungal, bacterial or viral infection.

[1061] The protozoan, fungal, bacterial or viral infection may be an infection of a protozoa, fungus, bacterium or virus as defined in the first aspect.

[1062] In a tenth aspect of the invention, there is provided an RNA construct according to the first aspect, the nucleic acid according to the second aspect, the expression cassette according to the third aspect, the vector according to the fourth aspect or the pharmaceutical composition according to the fifth aspect, for use in the prevention, amelioration or treatment of cancer.

[1063] The cancer may be as defined in the first aspect.

[1064] In an eleventh aspect of the invention, there is provided a method for treating a protozoan, fungal, bacterial or viral infection, the method comprising administering, to a subject in need thereof, a therapeutically effective amount of the RNA construct according to the first aspect, the nucleic acid according to the second aspect, the expression cassette according to the third aspect, the vector according to the fourth aspect or the pharmaceutical composition according to the fifth aspect.

[1065] The protozoan, fungal, bacterial or viral infection to be treated may be an infection of a protozoa, fungus, bacterium or virus as defined in the first aspect.

[1066] In a twelfth aspect of the invention, there is provided a method for treating cancer, the method comprising administering, to a subject in need thereof, a therapeutically effective amount of the RNA construct according to the first aspect, the nucleic acid according to the second aspect, the expression cassette according to the third aspect, the vector according to the fourth aspect or the pharmaceutical composition according to the fifth aspect.

[1067] The cancer to be treated may be as defined in the first aspect.

[1068] The RNA construct described herein provides an effective means of vaccinating a subject (e.g. against a viral, bacterial or fungal infection) and cancer.

[1069] Accordingly, in a thirteenth aspect of the invention, there is provided a vaccine comprising the RNA construct according to the first aspect, the nucleic acid according to the second aspect, the expression cassette according to the third aspect, the vector according to the fourth aspect or the pharmaceutical composition according to the fifth aspect.

[1070] The adjuvant incorporated into a delivery formulation may be selected form the group consisting of a bacterial lipopeptide, lipoprotein and lipoteichoic acid; mycobacterial lipoglycan; yeast zymosan, porin, Lipopolysaccharide, Lipid A, monophosphoryl lipid A (MPL), Flagellin, CpG DNA, hemozoin, Tomatine, ISCOM, ISCOMATRIX™, squalene based emulsions, polymers such as PEI, Carbopol, lipid nanoparticles and bacterial toxins (CT, LT). Other examples of adjuvants incorporated into the delivery formulation may include an aluminium salt, a synthetic form of DNA, a carbohydrate, a tablet binder, an ion exchange resin, a preservative, a polymer, an emulsion and/or a lipid. Examples of adjuvants may include monosodium glutamate, sucrose, dextrose, aluminum bovine, human serum albumin, cytosine phosphoguanine, potassium phosphate, plasdone C, anhydrous lactose, cellulose, polacrilin potassium, glycerine, asparagine, citric acid, potassium phosphate magnesium sulfate, iron ammonium citrate, 2-phenoxyethanol, aluminium, beta-propiolactone, bovine extract, DOPC, EDTA, formaldehyde, thimerosal, phenol, potassium aluminum sulfate, potassium glutamate, sodium borate, sodium metabisulphite, urea, PLGA, PVA, PLA, PVP, cyclodextrin-based stabilisers, oil in water emulsion adjuvants and/or lipid-based adjuvants.

[1071] In a fourteenth aspect of the invention, there is provided an RNA construct according to the first aspect, the nucleic acid according to the second aspect, the expression cassette according to the third aspect, the vector according to the fourth aspect or the pharmaceutical composition according to the fifth aspect, for use in stimulating an immune response in a subject.

[1072] The immune response may be stimulated against a protozoa, bacterium, virus, fungus or cancer as per the antigens defined in the first aspect.

[1073] In another aspect, there is provided a method of vaccinating a subject, the method comprising administering, or having administered, to a subject in need thereof, a therapeutically effective amount of the first aspect, the nucleic acid according to the second aspect, the expression cassette according to the third aspect, the vector according to the fourth aspect or the pharmaceutical composition according to the fifth aspect.

[1074] According to a fifteenth aspect, there is provided an RNA construct according to the first aspect, the nucleic acid according to the second aspect, the expression cassette according to the third aspect, the vector according to the fourth aspect or the pharmaceutical composition according to the fifth aspect, for use in stem cell therapy.

[1075] Stem cell therapy may relate to the reprogramming somatic cells to cells having stem cell characteristics.

[1076] Somatic cells may be reprogrammed by delivering one or more proteins that are capable of enhancing reprogramming of somatic cells to cells having stem cell characteristics as defined in the first aspect.

[1077] According to a sixteenth aspect, there is provided a method of modifying a cell ex vivo or in vitro, comprising delivering, to the cell, the RNA construct according to the first aspect, the nucleic acid according to the second aspect, the expression cassette according to the third aspect, the vector according to the fourth aspect or the pharmaceutical composition according to the fifth aspect.

[1078] Preferably, the method is performed ex vivo.

[1079] The cell may be a eukaryotic or prokaryotic cell. Preferably, the cell is a eukaryotic cell. More preferably, the cell is a mammalian host cell. Most preferably, the cell is a human cell.

[1080] Preferably, the modified cell is suitable for cell-therapy indications.

[1081] In a seventeenth aspect, there is provided a modified cell obtained from, or obtainable by, the method of the sixteenth aspect.

[1082] In an eighteenth aspect, there is provided the modified cell of the seventeenth aspect, for use in therapy, optionally cell therapy.

[1083] It will be appreciated that the RNA construct according to the first aspect, the nucleic acid according to the second aspect, the expression cassette according to the third aspect, the vector according to the fourth aspect or the pharmaceutical composition according to the fifth aspect (herein known as the active agents) may be used in a medicament, which may be used as a monotherapy (i.e. use of the active agent), for treating, ameliorating, or preventing disease or vaccination. Alternatively, the active agents according to the invention may be used as an adjunct to, or in combination with, known therapies for treating, ameliorating, or preventing disease.

[1084] The RNA construct, nucleic acid sequence, expression cassette, vector or pharmaceutical composition of the invention may be combined in compositions having a number of different forms depending, in particular, on the manner in which the composition is to be used. Thus, for example, the composition may be in the form of a powder, tablet, capsule, liquid, ointment, cream, gel, hydrogel, aerosol, spray, micellar solution, transdermal patch, liposome suspension, polyplex, emulsion, lipid nanoparticles (with RNA on the surface or encapsulated) or any other suitable form that may be administered to a person or animal in need of treatment or vaccination. It will be appreciated that the vehicle of medicaments according to the invention should be one which is well-tolerated by the subject to whom it is given.

[1085] The RNA construct, nucleic acid sequence, expression cassette, vector or pharmaceutical composition of the invention may also be incorporated within a slow- or delayed-release device. Such devices may, for example, be inserted on or under the skin, and the medicament may be released over weeks or even months. The device may be located at least adjacent to the treatment site. Such devices may be particularly advantageous when long-term treatment with the RNA construct or the recombinant vector is required and which would normally require frequent administration (e.g. at least daily injection).

[1086] In a preferred embodiment, however, medicaments according to the invention may be administered to a subject by injection into the blood stream, muscle, skin or directly into a site requiring treatment. Most preferably, the medicaments, including the RNA construct, are injected into muscle. Injections may be intravenous (bolus or infusion) or subcutaneous (bolus or infusion), or intradermal (bolus or infusion), or intramuscular (bolus or infusion).

[1087] It will be appreciated that the amount of RNA construct, nucleic acid sequence, expression cassette, vector or pharmaceutical composition that is required is determined by its biological activity and bioavailability, which in turn depends on the mode of administration, the physiochemical properties of the RNA construct, nucleic acid sequence, expression cassette, vector or pharmaceutical composition and whether it is being used as a monotherapy or in a combined therapy. The frequency of administration will also be influenced by the half-life of the active agent within the subject being treated. Optimal dosages to be administered may be determined by those skilled in the art, and will vary with the particular the RNA construct, nucleic acid sequence, expression cassette, vector or pharmaceutical composition in use, the strength of the pharmaceutical composition, the mode of administration, and the type and advancement of the viral infection. Additional factors depending on the particular subject being treated will result in a need to adjust dosages, including subject age, weight, gender, diet, and time of administration.

[1088] Generally, a daily dose of between 0.001 μg/kg of body weight and 10 mg/kg of body weight, or between 0.1 μg/kg of body weight and 1 mg/kg of body weight, of the RNA construct, nucleic acid sequence, expression cassette, vector or pharmaceutical composition of the invention may be used for treating, ameliorating, or preventing a disease, depending upon the active agent used.

[1089] Daily doses may be given as a single administration (e.g. a single daily injection or inhalation of a nasal spray). Alternatively, the RNA construct, nucleic acid sequence, expression cassette, vector or pharmaceutical composition may require administration twice or more times during a day. As an example, the RNA construct, nucleic acid sequence, expression cassette, vector or pharmaceutical composition may be administered as two (or more depending upon the severity of the disease being treated) daily doses of between 0.07 μg and 700 mg (i.e. assuming a body weight of 70 kg). A patient receiving treatment may take a first dose upon waking and then a second dose in the evening (if on a two dose regime) or at 3- or 4-hourly intervals thereafter. Alternatively, a slow release device may be used to provide optimal doses of the RNA construct, nucleic acid sequence, expression cassette, vector or pharmaceutical composition according to the invention to a patient without the need to administer repeated doses.

[1090] Preferably, however, the RNA construct, nucleic acid sequence, expression cassette, vector or pharmaceutical composition according to the invention may be given as a weekly dose, and more preferably a fortnightly dose.

[1091] Known procedures, such as those conventionally employed by the pharmaceutical industry (e.g. in vivo experimentation, clinical trials, etc.), may be used to form specific formulations of the RNA construct, nucleic acid sequence, expression cassette or vector according to the invention and precise therapeutic regimes (such as daily doses of the agents and the frequency of administration).

[1092] A “subject” may be a vertebrate, mammal, or domestic animal. Hence, compositions and medicaments according to the invention may be used to treat any mammal, for example livestock (e.g. a horse), pets, or may be used in other veterinary applications. Most preferably, however, the subject is a human being.

[1093] A “therapeutically effective amount” of the RNA construct, nucleic acid sequence, expression cassette, vector or pharmaceutical composition is any amount which, when administered to a subject, is the amount of the aforementioned that is needed to ameliorate, prevent or treat any given disease.

[1094] For example, the RNA construct, nucleic acid sequence, expression cassette, vector or pharmaceutical composition of the invention may be used from about 0.0001 mg to about 800 mg, and preferably from about 0.001 mg to about 500 mg. It is preferred that the amount of the replicon, nucleic acid sequence, expression cassette, vector or pharmaceutical composition is an amount from about 0.001 mg to about 250 mg, and most preferably from about 0.01 mg to about 1 mg. Preferably, the RNA construct, nucleic acid sequence, expression cassette, vector or pharmaceutical composition according to the invention is administered at a dose of 1-200 g.

[1095] A “pharmaceutically acceptable vehicle” as referred to herein, is any known compound or combination of known compounds that are known to those skilled in the art to be useful in formulating pharmaceutical compositions.

[1096] In one embodiment, the pharmaceutically acceptable vehicle may be a solid, and the composition may be in the form of a powder or tablet. A solid pharmaceutically acceptable vehicle may include one or more substances which may also act as flavouring agents, lubricants, solubilisers, suspending agents, dyes, fillers, glidants, compression aids, inert binders, sweeteners, preservatives, dyes, coatings, or tablet-disintegrating agents. The vehicle may also be an encapsulating material. In powders, the vehicle is a finely divided solid that is in admixture with the finely divided active agents according to the invention. In tablets, the active agent (e.g. RNA construct, nucleic acid sequence, expression cassette, vector or pharmaceutical composition according to the invention) may be mixed with a vehicle having the necessary compression properties in suitable proportions and compacted in the shape and size desired. The powders and tablets preferably contain up to 99% of the active agents. Suitable solid vehicles include, for example calcium phosphate, magnesium stearate, tale, sugars, lactose, dextrin, starch, gelatin, cellulose, polyvinylpyrrolidine, low melting waxes and ion exchange resins. In another embodiment, the pharmaceutical vehicle may be a gel and the composition may be in the form of a cream or the like.

[1097] However, the pharmaceutical vehicle may be a liquid, and the pharmaceutical composition is in the form of a solution. Liquid vehicles are used in preparing solutions, suspensions, emulsions, syrups, elixirs and pressurized compositions. The RNA construct, nucleic acid sequence, expression cassette, vector or pharmaceutical composition according to the invention may be dissolved or suspended in a pharmaceutically acceptable liquid vehicle such as water, an organic solvent, a mixture of both or pharmaceutically acceptable oils or fats. The liquid vehicle can contain other suitable pharmaceutical additives such as solubilisers, emulsifiers, buffers, preservatives, sweeteners, flavouring agents, suspending agents, thickening agents, colours, viscosity regulators, stabilizers or osmo-regulators. Suitable examples of liquid vehicles for oral and parenteral administration include water (partially containing additives as above, e.g. cellulose derivatives, preferably sodium carboxymethyl cellulose solution), alcohols (including monohydric alcohols and polyhydric alcohols, e.g. glycols) and their derivatives, and oils (e.g. fractionated coconut oil and arachis oil). For parenteral administration, the vehicle can also be an oily ester such as ethyl oleate and isopropyl myristate. Sterile liquid vehicles are useful in sterile liquid form compositions for parenteral administration. The liquid vehicle for pressurized compositions can be a halogenated hydrocarbon or other pharmaceutically acceptable propellant.

[1098] Liquid pharmaceutical compositions, which are sterile solutions or suspensions, can be utilized by, for example, subcutaneous, intradermal, intrathecal, epidural, intraperitoneal, intravenous and particularly intramuscular injection. The nucleic acid sequence, or expression cassette of the invention may be prepared as a sterile solid composition that may be dissolved or suspended at the time of administration using sterile water, saline, or other appropriate sterile injectable medium.

[1099] The RNA construct, nucleic acid sequence, expression cassette, vector or pharmaceutical composition of the invention may be administered orally in the form of a sterile solution or suspension containing other solutes or suspending agents (for example, enough saline or glucose to make the solution isotonic), bile salts, acacia, gelatin, sorbitan monoleate, polysorbate 80 (oleate esters of sorbitol and its anhydrides copolymerized with ethylene oxide) and the like. The RNA construct, nucleic acid sequence, expression cassette, vector or pharmaceutical composition according to the invention can also be administered orally either in liquid or solid composition form. Compositions suitable for oral administration include solid forms, such as pills, capsules, granules, tablets, and powders, and liquid forms, such as solutions, syrups, elixirs, and suspensions. Forms useful for parenteral administration include sterile solutions, emulsions, and suspensions.

[1100] It will be appreciated that the invention extends to any nucleic acid or peptide or variant, derivative or analogue thereof, which comprises substantially the amino acid or nucleic acid sequences of any of the sequences referred to herein, including variants or fragments thereof. The terms “substantially the amino acid/nucleotide/peptide sequence”, “variant” and “fragment”, can be a sequence that has at least 40% sequence identity with the amino acid/nucleotide/peptide sequences of any one of the sequences referred to herein, for example 40% identity with any of the sequences identified herein.

[1101] Amino acid/polynucleotide/polypeptide sequences with a sequence identity which is greater than 65%, more preferably greater than 70%, even more preferably greater than 75%, and still more preferably greater than 80% sequence identity to any of the sequences referred to are also envisaged. Preferably, the amino acid/polynucleotide/polypeptide sequence has at least 85% identity with any of the sequences referred to, more preferably at least 90% identity, even more preferably at least 92% identity, even more preferably at least 95% identity, even more preferably at least 97% identity, even more preferably at least 98% identity and, most preferably at least 99% identity with any of the sequences referred to herein.

[1102] The skilled technician will appreciate how to calculate the percentage identity between two amino acid/polynucleotide/polypeptide sequences. In order to calculate the percentage identity between two amino acid/polynucleotide/polypeptide sequences, an alignment of the two sequences must first be prepared, followed by calculation of the sequence identity value. The percentage identity for two sequences may take different values depending on:—(i) the method used to align the sequences, for example, ClustalW, BLAST, FASTA, Smith-Waterman (implemented in different programs), or structural alignment from 3D comparison; and (ii) the parameters used by the alignment method, for example, local vs global alignment, the pair-score matrix used (e.g. BLOSUM62, PAM250, Gonnet etc.), and gap-penalty, e.g. functional form and constants.

[1103] Having made the alignment, there are many different ways of calculating percentage identity between the two sequences. For example, one may divide the number of identities by: (i) the length of shortest sequence; (ii) the length of alignment; (iii) the mean length of sequence; (iv) the number of non-gap positions; or (v) the number of equivalenced positions excluding overhangs. Furthermore, it will be appreciated that percentage identity is also strongly length dependent. Therefore, the shorter a pair of sequences is, the higher the sequence identity one may expect to occur by chance.

[1104] Hence, it will be appreciated that the accurate alignment of protein or DNA sequences is a complex process. The popular multiple alignment program ClustalW (Thompson et al., 1994, Nucleic Acids Research, 22, 4673-4680; Thompson et al., 1997, Nucleic Acids Research, 24, 4876-4882) is a preferred way for generating multiple alignments of proteins or DNA in accordance with the invention. Suitable parameters for ClustalW may be as follows: For DNA alignments: Gap Open Penalty=15.0, Gap Extension Penalty=6.66, and Matrix=Identity. For protein alignments: Gap Open Penalty=10.0, Gap Extension Penalty=0.2, and Matrix=Gonnet. For DNA and Protein alignments: ENDGAP=−1, and GAPDIST=4. Those skilled in the art will be aware that it may be necessary to vary these and other parameters for optimal sequence alignment.

[1105] Preferably, calculation of percentage identities between two amino acid/polynucleotide/polypeptide sequences may then be calculated from such an alignment as (N/T)*100, where N is the number of positions at which the sequences share an identical residue, and T is the total number of positions compared including gaps and either including or excluding overhangs. Preferably, overhangs are included in the calculation. Hence, a most preferred method for calculating percentage identity between two sequences comprises (i) preparing a sequence alignment using the ClustalW program using a suitable set of parameters, for example, as set out above; and (ii) inserting the values of N and T into the following formula:—Sequence Identity=(N/T)*100.

[1106] Alternative methods for identifying similar sequences will be known to those skilled in the art. For example, a substantially similar nucleotide sequence will be encoded by a sequence which hybridizes to DNA sequences or their complements under stringent conditions. By stringent conditions, the inventors mean the nucleotide hybridises to filter-bound DNA or RNA in 3× sodium chloride/sodium citrate (SSC) at approximately 45° C. followed by at least one wash in 0.2×SSC/0.1% SDS at approximately 20-65° C. Alternatively, a substantially similar polypeptide may differ by at least 1, but less than 5, 10, 20, 50 or 100 amino acids from any of the sequences described herein.

[1107] Due to the degeneracy of the genetic code, it is clear that any nucleic acid sequence described herein could be varied or changed without substantially affecting the sequence of the protein encoded thereby, to provide a functional variant thereof. Suitable nucleotide variants are those having a sequence altered by the substitution of different codons that encode the same amino acid within the sequence, thus producing a silent (synonymous) change. Other suitable variants are those having homologous nucleotide sequences but comprising all, or portions of, sequence, which are altered by the substitution of different codons that encode an amino acid with a side chain of similar biophysical properties to the amino acid it substitutes, to produce a conservative change. For example, small non-polar, hydrophobic amino acids include glycine, alanine, leucine, isoleucine, valine, proline, and methionine. Large non-polar, hydrophobic amino acids include phenylalanine, tryptophan and tyrosine. The polar neutral amino acids include serine, threonine, cysteine, asparagine and glutamine. The positively charged (basic) amino acids include lysine, arginine and histidine. The negatively charged (acidic) amino acids include aspartic acid and glutamic acid. It will therefore be appreciated which amino acids may be replaced with an amino acid having similar biophysical properties, and the skilled technician will know the nucleotide sequences encoding these amino acids.

[1108] All of the features described herein (including any accompanying claims, abstract and drawings), and/or all of the steps of any method or process so disclosed, may be combined with any of the above aspects in any combination, except combinations where at least some of such features and/or steps are mutually exclusive.

[1109] For a better understanding of the invention, and to show how embodiments of the same may be carried into effect, reference will now be made, by way of example, to the accompanying Figures, in which:—

[1110] FIG. 1 shows a schematic of various embodiments (denoted 1-7) of the RNA construct of the invention (e.g. a saRNA replicon on the left, or a mRNA construct). The saRNA replicon (1-4) is based on an alpha virus backbone. This so-called ‘Stealthicon’ vector includes a 5′ UTR followed by nucleic acid encoding Non-structural Proteins (NSP1-4) from an alphavirus, such as VEEV, a sub-genomic promoter (SGP), a GOI (Gene of Interest), such as a viral, bacterial, fungal or mammalian protein or antigen, a viral innate inhibitor protein (IIP), a 3′ UTR and a 3′ poly A tail. The mRNA construct (5-7) includes a 5′ UTR, a GOI (Gene of Interest), such as a viral, bacterial, fungal or mammalian protein or antigen, a viral innate inhibitor protein (IIP), a 3′ UTR and a 3′ poly A tail. The order of the IIP and GOI can be varied for both saRNA and mRNA as shown in the different illustrated embodiments;

[1111] FIG. 2 illustrates the immune response in a subject vaccinated (an initial primer jab followed by a subsequent boost jab) with a messenger RNA (mRNA) vaccine;

[1112] FIG. 3 illustrates the immune response in a subject vaccinated (an initial primer jab followed by a boost jab) with a standard self-amplifying (saRNA) vaccine;

[1113] FIG. 4 illustrates the immune response in a subject vaccinated (an initial primer jab followed by a boost jab) with one embodiment of the RNA construct of the invention, for example the Stealthicon vector shown in FIG. 1;

[1114] FIG. 5 illustrates the antigen expression level in a subject vaccinated (an initial primer jab followed by a boost jab) with one embodiment of the RNA construct of the invention, i.e. the Stealthicon vector shown in FIG. 1;

[1115] FIG. 6 shows f-Luc expression in HeLa cells following transfection with VEEV replicons containing selected IIP in F-T2A configuration relative to expression in HEK293T/17 cells. HEK293T/17 and HeLa cells were transfected with saRNA (100 ng) containing luciferase as a reporter protein and assessed for protein expression after 24 hr;

[1116] FIG. 7 shows f-Luc expression in HeLa cells following transfection with VEEV replicons containing selected IIP in F-T2A configuration relative to expression in HEK293T/17 cells. HEK293T/17 and HeLa cells were transfected with saRNA (100 ng) containing luciferase as a reporter protein and assessed for protein expression after 24 hr;

[1117] FIG. 8 shows f-Luc expression in HeLa cells following transfection with selected VEEV replicons containing IP in F-T2A configuration relative to expression in HEK293T/17 cells. HEK293T/17 and HeLa cells were transfected with saRNA (100 ng) containing luciferase as a reporter protein and assessed for protein expression after 24 hr;

[1118] FIG. 9 shows f-Luc expression in HeLa cells following transfection with VEEV replicons containing IIP in a double sub-genomic promoter (DSGP) configuration relative to expression in HEK293T/17 cells. HEK293T/17 and HeLa cells were transfected with saRNA (100 ng) containing luciferase as a reporter protein and assessed for protein expression after 24 hr;

[1119] FIG. 10 shows the increase in VEGF-A expression in HeLa cells following transfection with saRNA containing the IIP HSV ICP34.5 in a F-T2A configuration compared to saRNA without IIP and relative to expression in HEK293T/17 cells. HEK293T/17 and HeLa cells were transfected with saRNA (100 ng) containing VEGF-A as a secreted reporter protein and assessed for protein expression in the culture media after 48 hr by ELISA;

[1120] FIG. 11 compares f-Luc expression in HeLa cells following transfection with saRNA containing f-Luc as the GOI (construct 1) and with the IIP MERS ORF4a in F-T2A configuration (constructs 2a and 2b), IRES configuration (construct 3b) and DSGP configurations (constructs 4a and 4b) shown in FIG. 1. HeLa cells were transfected with RNA (100 ng) containing luciferase as a reporter protein and assessed for protein expression after 24 hr, and

[1121] FIG. 12 shows n-Luc expression f-Luc expression in HeLa cells following transfection with mRNA containing IIP in F-T2A configuration relative to expression in HEK293T/17 cells. HEK293T/17 and HeLa cells were transfected with RNA (100 ng) containing luciferase as a reporter protein and assessed for protein expression after 24 hr.

### EXAMPLES

[1122] The inventors hypothesized that cis encoding proteins from non-viral sources, such as humans and other mammals, that are known to inhibit the innate recognition of saRNA or mRNA, would dampen the innate sensing in the host cell, and enhance both the protein expression and immunogenicity of RNA vaccines. Thus, the inventors designed and tested a range of RNA constructs (saRNA and mRNA) containing viral innate immune inhibitor proteins (IIPs) and a gene of interest (GOI), and then characterized whether these constructs enhance both intracellular and secreted protein expression (encoded by the gene of interest).

[1123] Materials and Methods

[1124] Cloning of saRNA Replicon Plasmids Containing IIPs

[1125] SaRNA encoding firefly luciferase (fLuc) and replicase derived from the Venezuelan equine encephalitis virus (VEEV) were cloned into a plasmid vector, as previously described (1). Replicon plasmids containing reporter gene followed by IIP (firefly luciferase f-Luc; Uniprot: Q27758) were generated with Furin-T2A or double sub-genomic promoters. Double sub-genomic (DSG) constructs are designed to initiate transcription of separate RNA molecules encoding the fLuc and IIP and were produced by cloning into a base double sub-genomic vector using Gibson assembly and a nucleotide base overlap. Briefly, plasmid DNA was restriction digested for 2 h at 37° C. and used in a NEB Builder HiFi DNA assembly reaction with gene fragment strings synthesised by GeneArt (Regensburg, Germany) or Integrated DNA Technologies (IDT) (Iowa, USA) according to manufacturer's protocol (New England BioLabs, UK). Furin-T2A (F-T2A) constructs designed to generate a single RNA transcript from the VEEV primary sub-genomic promoter with no stop codon for fLuc translation were produced by cloning IIP with F-T2A sequence into restriction enzyme sites of the corresponding DSG plasmid vector. After incubation at 50° C. for 30 min, 2 uL of the NEB Builder HiFi assembly reaction was used to transform NEB 10-alpha bacteria and the transformants plated onto LB agar plates and incubated overnight. Colonies were selected, expanded overnight and recombinant plasmid purified using Qiagen plasmid miniprep kits (Qiagen, UK). Purified clonal plasmids were analysed using a diagnostic restriction enzyme digest and those which exhibited the correct digestion pattern were fully sequenced to confirm nucleotide identity (Eurofins, Germany).

[1126] Plasmids that had IIP followed by the reporter gene in the F-T2A or DSG form as well as constructs that utilized the ECMV IRES internal ribosomal entry sequence (which initiates protein translation from the IRES element at a site internal to a messenger RNA transcript; Bochkov and Palmenburg, Biotechniques 41(3):283-4, 2006) were generated by VectorBuilder (VectorBuilder, Germany) using standard molecular techniques.

[1127] The incorporated interferon inhibiting proteins (IIP) can be found with the following database identifiers/accession numbers: EBOV VP35 (Ebola virus VP35; NP_066244.1; Accession Number—NCBI Reference Sequence: NC_002549.1; UniProtKB—Q05127 (VP35_EBOZM); EV71-2Apro (Enterovirus 71 2A pro; Accession Numbers—GenBank KC875402.1 and AG028195.1; UniProtKB—Q66478 (POLG_HE71B); HCV E2 (hepatitis C virus E2; NS1 Protein from polyprotein AAA45534.1; Accession Number—Genomic RNA Translation AAA45534.1; UniProtKB—P27958 (384-746) (POLG_HCV77)); HCV NS5a (hepatitis C virus NS5a; isolate H—Genomic RNA translation: AAA45534.1; UniProtKB—P27958 (POLG_HCV77)); HPV E6 (Human papillomavirus E6; NP_041325.1; Accession Number—NCBI Reference Sequence: NC_001526.4; UniProtKB—P03126 (VE6_HPV16)); HSV ICP34.5 (Herpes simplex virus ICP34.5; YP_009137073.1; Accession Number—NCBI Reference Sequence: NC_001806.2; UniProtKB—P36313 (ICP34_HHV11)); KSHV ORF52 (Kaposi's sarcoma-associated herpesvirus ORF52; Accession Number—Genomic DNA Translation: ACY00451.1; UniProtKB—F5HBL8 (F5HBL8_HHV8)); MERS ORF8b (Middle East Respiratory Syndrome virus ORF8b; Accession Number—Genomic RNA Translation ANF29170.1; UniProtKB—A0A1W5LGP6 (A0A1W5LGP6_MERS)); VACV C6 Vaccinia C6 (vaccinia virus C6; Accession Number—Genomic DNA Translation: AAA69602.1; UniProtKB—P17362 (C6_VACCW)); VACV K3L (vaccinia virus K3L; Accession Number—Genomic DNA Translation: AAA48009.1; UniProtKB—P20639 (K3 VACCC)); PIV 5 V (Parainfluenza virus 5 V; ENA protein ID: AAA47882.1; GenBank Accession Number J03142.1; UniProtKB—P11207; V_PIV5)); SARS ORF3b*57 variant (Severe acute respiratory syndrome coronavirus 2 (2019-nCoV) (SARS-CoV-2) ORF3b protein-mutated stop codon at AA 23; Genomic RNA Translation QTT40181.1; UniProtKB—PoDTF1 (ORF3B_SARS2)); SARS ORF3b*79 variant (Severe acute respiratory syndrome coronavirus 2 (2019-nCoV) (SARS-CoV-2) ORF3b protein-mutated stop codons at AA 23 and AA 57; Genomic RNA Translation QTT40181.1; UniProtKB—PoDTF1 (ORF3B_SARS2)); SARS ORF3b*57 Ecuador variant (Severe acute respiratory syndrome coronavirus 2 (2019-nCoV) (SARS-CoV-2) ORF3b protein-mutated stop codon at AA 23; Ecuador mutation at AA 24 (L24M); Genomic RNA Translation QTT40181.1; UniProtKB—PoDTF1 (ORF3B_SARS2)); Pangolin ORF3b *57 (Pangolin Coronavirus—Genomic RNA Translation: QIG55946.1; ORF3b protein-mutated stop codon at AA 23; UniProtKB—A0A6M3G7Q4 (A0A6M3G7Q4_9BETC)); Pangolin ORF3b *79 (Pangolin Coronavirus—Genomic RNA Translation: QIG55946.1; ORF3b protein-mutated stop codons at AA 23 and AA 57; UniProtKB—A0A6M3G7Q4 (A0A6M3G7Q4_9BETC)); MERS ORF4a (Middle East respiratory syndrome-related coronavirus (MERS-CoV) NS4A protein—Genomic RNA Translation: AGV08457.1; UniProtKB: T2BBG6 (T2BBG6_MERS)); BVDV nPro (Bovine viral diarrhea virus (BVDV) (Mucosal disease virus) N-terminal protease (aa 1-168)—Genomic RNA Translation: AAA42854.1; UniProtKB: P19711 (POLG_BVDVN)); HSV US1 (Human herpesvirus 2 (strain HG52) (HHV-2) (Human herpes simplex virus 2) E3 ubiquitin ligase ICP22 US1—Genomic DNA Translation: CAB06708.1; UniProtKB: P89474 (ICP22_HHV2H)); MERS CoV M (Middle East respiratory syndrome-related coronavirus (MERS-CoV) Membrane protein (M)-Genomic RNA Translation: AGV08396.1; UniProtKB: T2BB40 (T2BB40_MERS)).
[1128] (1) A. K. Blakney, P. F. McKay, R. J. Shattock, Structural Components for Amplification of Positive and Negative Strand VEEV Splitzicons. Frontiers in Molecular Biosciences 5, 71 (2018).

[1129] Cloning of Plasmids Containing IIPs for RNA Transcription

[1130] IIP were inserted into a base plasmid using restriction digestion followed by Gibson assembly with a nucleotide base overlap region and included a F-T2A sequence to allow for a single transcript expression of the n-Luc followed by an IIP. The base plasmid consisted of an mRNA encoding a luminous shrimp nanoluciferase (n-Luc) expression cassette with a T7 promoter, an alpha-globin 5′ UTR and a beta-globin 3′ UTR. Briefly, the n-Luc plasmid construct was linearized with restriction enzymes for 2 h at 37° C. and then used in a NEB Builder HiFi DNA assembly reaction essentially as described in the NEB Builder HiFi assembly protocol (New England BioLabs, UK). After incubation at 50° C. for 30 min, 2 uL of the assembly reaction was used to transform NEB 10-alpha bacteria as per protocol and the transformants plated onto LB agar plates and incubated overnight for colony growth. Colonies were selected and expanded overnight, the recombinant plasmid purified from the bacteria using Qiagen plasmid miniprep kit (Qiagen, UK) and purified clonal plasmids were analysed initially using a diagnostic restriction enzyme digest and those which exhibited the correct digestion pattern were fully sequenced to confirm nucleotide identity (Eurofins, Germany).

[1131] Plasmids that had IIP followed by the n-Luc in the F-T2A or DSG form as well as constructs that utilized the ECMV IRES internal ribosomal entry sequence (which initiates protein translation from the IRES element at a site internal to a messenger RNA transcript; Bochkov and Palmenburg, Biotechniques 41(3):283-4, 2006) for both the saRNA replicons and the plasmids used for mRNA transcription were generated by VectorBuilder (VectorBuilder, Germany) using standard molecular techniques.

[1132] In Vitro Transcription of saRNA

[1133] Plasmid DNA (pDNA) was transformed into Escherichia coli (E. coli) (New England BioLabs, UK) and cultured in 100 mL of Luria Broth (LB) with 100 μg/mL of carbenicillin (Sigma Aldrich, UK). pDNA was isolated using a Plasmid Plus MaxiPrep kit (QIAGEN, UK) and the final concentration measured on a NanoDrop One (ThermoFisher, UK). saRNA was transcribed from the pDNA template using CleanCap Reagent AG (Tebu-bio, France) to produce an RNA transcript with a naturally occurring Cap 1 structure. Briefly, the pDNA template was linearized for 3 h at 37° C., then 1 μg of the linearized pDNA template used in the standard CleanCap Transcription protocol (Tebu-bio, France) according to the manufacturer's protocol. Transcripts were purified by LiCl precipitation at −20° C. for at least 30 min, centrifuged at 20,000 g for 20 min at 4° C. to pellet the RNA, rinsed once with 70% EtOH, centrifuged again at 20,000 g for 5 min at 4° C. and resuspended in UltraPure H₂O (Ambion, UK) and stored at −80° C. until further use.

[1134] In Vitro Transcription of RNA

[1135] pDNA was transformed into E. coli (New England BioLabs, UK), cultured in 100 mL of Luria Broth (LB) with 100 μg/mL of carbenicillin (Sigma Aldrich, UK). Plasmid was purified using a Plasmid Plus MaxiPrep kit (QIAGEN, UK) and the concentration and purity measured on a NanoDrop One (ThermoFisher, UK). RNA was transcribed from the plasmid DNA template using the MEGAscript™ T7 Transcription protocol (ThermoFisher, UK) followed by a ScriptCap™ m7G Capping System post translation (Cambio, UK). Briefly, pDNA was linearized for 3 h at 37° C., and 1 μg of the linearized pDNA template used in the standard reaction protocol. After the MEGAscript™ T7 Transcription the transcripts were purified by LiCl precipitation at −20° C. for at least 30 min, then centrifuged at 20,000 g for 20 min at 4° C. to pellet the RNA, rinsed once with 70% EtOH, centrifuged again at 20,000 g for 5 min at 4° C. and resuspended in UltraPure H₂O (Ambion, UK). The transcripts were then post-transcriptionally capped using the ScriptCap™ m7G Capping System standard protocol and finally LiCl precipitated as described above. Purified and Cap 1 capped RNA was then resuspended in UltraPure H₂O (Ambion, UK) and stored at −80° C. until further use.

[1136] Measurement of IIP Activity

[1137] In order to establish the ability of saRNA containing viral IIP to increase saRNA f-luc expression relative to saRNA without IIP; the ability of mRNA containing IIP to increase mRNA n-luc expression relative to mRNA without IIP and the ability of mRNA containing IIP to increase f-luc expression from saRNA without IIP, constructs were tested in interferon competent HeLa cells and expression compared to that obtained in HEK293T/17 cells which do not have a functional antiviral signalling pathway. Both cell lines were cultured in high glucose Dulbecco's Modified Eagle's Medium (cDMEM) (Sigma-Aldrich, Merck, UK) containing 10% (v/v) fetal bovine serum (FBS), 5 mg/mL L-glutamine (Gibco, ThermoFisher, UK) and 5 mg/mL penicillin/streptomycin (Sigma-Aldrich, Merck, UK).

[1138] Assessment of IIP on saRNA Firefly Luciferase (f-Luc) Expression

[1139] HEK293T/17 cells were plated at a density of 25000 cells per well and HeLa cells at a density of 10000 cells per well into flat clear bottom 96-well plates (Corning Costar) and incubated for 24 hr. 10 uL of OptiMEM (ThermoFisher, UK) containing 0.15 μL lipofectamine MessengerMAX (ThermoFisher, UK) and 100 ng of saRNA IIP constructs or saRNA control (no IIP) was added to triplicate wells and after a further 24 hr, plates were centrifuged at 630 g for 5 min at room temperature, 50 μL of medium removed from each well and 50 μL of ONE-Glo™ Ex Reagent D-luciferin reagent (Promega, UK) added and mixed by pipetting. The total volume from each well was then transferred to a flat bottom opaque white 96-well plate (Corning Costar) and fluorescence measured on a FLUOstar OMEGA plate reader within 10 min (BMG LABTECH, UK). Background fluorescence from control wells containing no saRNA was subtracted from the signal for each well containing saRNA. Then the signal obtained for saRNA containing IIP in HeLa cells was expressed as a fold change from signal obtained with control saRNA and to that obtained in HEK293T/17 cells.

[1140] Assessment of IIP on saRNA VEGF-A Expression

[1141] HEK293T/17 or Hela cells were transfected with 100 ng saRNA containing the VEGF-A gene using the same methods as described for testing of constructs expressing f-Luc. After 48 hr the VEGF-A in the cell culture media was measured using a human VEGF-A ELISA kit (Invitrogen, UK). Briefly, assay plate wells were washed twice with 400 uL wash buffer before addition of test samples or VEGF-A standard (15.6 μg/ml to 1000 μg/ml). Plates were then incubated at room temperature for 2 hr in a microplate shaker (300 rpm; Jencons Scientific Ltd, UK) before washing six times with 400 uL wash buffer 100 uL of Biotin-conjugate detection antibody (1:100 dilution) was added to each well and plates incubated in a microplate shaker (1 hr RT, 300 rpm). After six washes with 400 uL of wash buffer, the streptavidin-HRP (1:100 dilution) second layer conjugate (100 uL) was added and after a further 1 hr incubation and six further washes, 100 uL of TMB substrate was added to each well. After incubation in the dark for 30 min at RT in the dark, 100 uL of the Stop solution was added and the absorbance of each well read at 450 nm in a VersaMax microplate spectrophotometer (Molecular Devices, UK). VEGF-A levels in the samples were determined by interpolation to the standard curve.

[1142] Assessment of IIP on RNA Nano-Luciferase (n-Luc) Expression

[1143] HEK293T/17 cells were plated at a density of 25000 cells per well and HeLa cells at a density of 10000 cells per well into flat clear bottom 96-well plates (Corning Costar) and incubated for 24 hr. 10 uL of OptiMEM (ThermoFisher, UK) containing 0.15 μL lipofectamine MessengerMAX (ThermoFisher, UK) and 100 ng of saRNA IIP constructs or saRNA control (no IIP) was added to triplicate wells and after a further 24 hr, plates were centrifuged at 630 g for 5 min at room temperature, 50 μL of medium removed from each well and 50 μL of NanoDLR™ Stop & Glo® Reagent (Promega, UK) added and mixed by pipetting. The total volume from each well was then transferred to a flat bottom opaque white 96-well plate (Corning Costar) and fluorescence measured on a FLUOstar® OMEGA plate reader within 10 min (BMG LABTECH, UK). Background fluorescence from control wells containing no RNA was subtracted from the signal for each well containing RNA. Then the signal obtained for RNA containing IIP in HeLa cells was expressed as a fold change from signal obtained with control RNA and to that obtained in HEK293T/17 cells.

### Example 1—Structural Design of Viral Innate Inhibitor Protein (IIP) Constructs

[1144] Viral innate inhibitor proteins (IIPs) can be incorporated into an RNA construct of the invention, which can be a self-amplifying RNA (saRNA) or messenger RNA (mRNA), in order to reduce or ablate the innate recognition and response that may modify or reduce protein expression and translation, i.e. the protein encoded by a Gene of Interest (GOI), which can be any therapeutic biomolecule.

[1145] Various embodiments of design configurations for the RNA construct of the invention are shown in FIG. 1. SaRNA expression constructs are based on an alphavirus backbone where the non-structural proteins are maintained, but the gene of interest (GOI) is inserted downstream of a subgenomic promotor (SGP) replacing the structural genes of the virus (see Embodiment “1” in FIG. 1). The GOI can be any protein at all, and may include viral, bacterial, fungal or mammalian protein, i.e. a biotherapeutic protein. However, the inventors envisage that the RNA construct of the invention will demonstrate significant utility in the vaccine space, and so the GOI would encode a vaccine antigen, such as a viral, bacterial or fungal protein, such as a coat protein.

[1146] saRNA Constructs (Left Hand of FIG. 1)

[1147] Any IIP can be encoded within the saRNA using the following design approaches:
[1148] Embodiment “2a” in FIG. 1 shows a saRNA construct encoding a fusion protein including a peptide cleavage motif (e.g. furin-T2a), such that the protein encoded by the GOI (e.g. the antigen of interest) and the IIP are cleaved into separate proteins on translation in the host cell;
[1149] In Embodiment “2b” in FIG. 1, the order of the GOI and IIP have been reversed, such that the IIP is 5′ of the GOI, again with a peptide cleavage motif between the IIP and the GOI so that two separate proteins are produced in the host cell following translation of the saRNA construct;
[1150] In Embodiment “3a”, the IIP has been inserted downstream of the GOI stop codon. The subgenomic promoter drives translation of the GOI, and expression/translation of the IIP is driven by the inclusion of an internal ribosomal entry site (IRES);
[1151] In Embodiment “3b”, the order of the GOI and IIP has been reversed such that translation of the IIP is promoted by the subgenomic promotor and of the GOI by the IRES;
[1152] In Embodiment “4a”, the IIP has been inserted downstream of the GOI stop codon. Translation of the GOI is promoted by the first subgenomic promoter and translation of the IIP is driven by the inclusion of a second subgenomic promotor;
[1153] In Embodiment “4b”, the position of the IIP and GOI have been swapped around, i.e. with the IIP placed before the GOI.

[1154] mRNA Constructs (Right Hand of FIG. 1)

[1155] Referring to FIG. 1, any IIP can also be encoded within mRNA (see Embodiment “5”) using the following design approaches:
[1156] In embodiment “6a”, the mRNA construct encodes a fusion protein including a peptide cleavage motif (e.g. F-T2a) such that the GOI and IIP are cleaved into separate proteins on translation;
[1157] In Embodiment “6b”, the order of the GOI and IIP have been reversed such that the IIP is 5′ of the GOI;
[1158] In Embodiment “7a”, the IIP has been inserted downstream of the GOI stop codon where translation is driven by the inclusion of an internal ribosomal entry site (IRES);
[1159] In Embodiment “7b”, the order of the GOI and IIP has been reversed such that translation is promoted by the subgenomic promotor and the GOI by the IRES.

[1160] The inventors have tested a large number of viral IIPs in the various embodiments of RNA constructs illustrated in FIG. 1, and believe that they each have potential to modify expression and response to saRNA and RNA.

### Example 2—Construction and Testing of saRNA Constructs Comprising a Viral Innate

[1161] Inhibitor Protein (IIP) The inventors designed, constructed and then tested a series of diverse viral IIPs in different replicon configurations on expression of the reporter gene, f-Luc or VEGF-A, and the results of the expression studies are shown in FIGS. 6-11.

[1162] Referring to FIG. 6, there is shown the fold increase in f-Luc expression in HeLa cells following transfection with VEEV replicons containing HPV E6, HSV ICP34.5, HCV E2, VACV E3L, MERS ORF8b or VACV K3L in an F-T2A configuration. HEK293T/17 and HeLa cells were transfected with saRNA (100 ng) containing luciferase as a reporter protein and assessed for protein expression after 24 hr. HeLa cells are known to have more intact IFN expression pathways compared to HEK293T/17 and therefore increased expression (fold increase) relative to a control (saRNA containing luciferase as reporter protein and no IIP) indicates that the IIP is increasing saRNA expression. Of these IIP, HSV ICP34.5 produced the greatest increase in f-Luc expression. Data shown are constructs providing a greater than −2-fold increase in luciferase expression in HeLa cells relative to expression in HEK293T/17 cells and are mean f SEM of data obtained in 3 independent experiments using 3 separate batches of saRNA.

[1163] Referring to FIG. 7, there is shown f-Luc expression in HeLa cells following transfection with VEEV replicons containing KHSV ORF52, EBOV VP35, SARS ORF3b* 57 variant, SARS ORF3b*79 variant, SARS ORF3b*57 Equador variant or Pangolin ORF3b* 57 in an F-T2A configuration relative to expression in HEK293T/17 cells. Details of experimental methods are provided in FIG. 6. Of these EBOV VP35 and SARS ORF3b*79 variant produced the greatest increase in f-Luc expression. Data shown are constructs providing a greater than 2-fold increase in luciferase expression in HeLa cells relative to expression in HEK293T/17 cells and are mean f SEM of data obtained in 3 independent experiments using 3 separate batches of saRNA.

[1164] Referring to FIG. 8, there is shown f-Luc expression in HeLa cells following transfection with selected VEEV replicons containing IIP in F-T2A configuration relative to expression in HEK293T/17 cells. Details of experimental methods are provided in FIG. 6. PIV V5 and MERS ORF4a produced the greatest increase inf-Luc expression. Data shown are constructs providing a greater than 2-fold increase in luciferase expression in HeLa cells relative to expression in HEK293T/17 cells and are mean f SEM of data obtained in 3 independent experiments using 3 separate batches of saRNA.

[1165] Referring to FIG. 9, there is shown f-Luc expression in HeLa cells following transfection with VEEV replicons containing IIP in a double sub-genomic promoter (DSGP) configuration relative to expression in HEK293T/17 cells. Details of experimental methods are provided in FIG. 6. HCV E2, VACV E3L and PIV 5V produced similar increases in f-Luc expression. Data shown are constructs providing a greater than 2-fold increase in luciferase expression in HeLa cells relative to expression in HEK293T/17 cells and are mean f SEM of data obtained in 3 independent experiments using 3 separate batches of saRNA.

[1166] Referring to FIG. 10, there is shown the increase in VEGF-A secretion from HeLa cells following transfection with saRNA containing the IIP HSV ICP34.5 in a F-T2A configuration compared to saRNA without IIP and relative to expression in HEK293T/17 cells. HEK293T/17 and HeLa cells were transfected with RNA (100 ng) containing VEGF-A as a reporter protein and assessed for protein expression and secretion into the culture media after 48 hr by ELISA. HeLa cells are known to have more intact IFN expression pathways compared to HEK293T/17 and therefore increased expression relative to a control (RNA containing VEGF-A as GOI and no IIP) indicates that HSV ICP34.5 increases saRNA GOI expression. Data are from one experiment and represent the mean f SEM of three replicate measurements.

[1167] Referring to FIG. 11, there is shown f-Luc expression in HeLa cells following transfection with saRNA containing f-Luc as the GOI (construct 1) and with the IIP MERS ORF4a in F-T2A configuration (constructs 2a and 2b), IRES configuration (construct 3b) and DSGP configurations (constructs 4a and 4b) shown in FIG. 1. Details of experimental methods are provided in FIG. 6. Data are mean±SEM of data obtained in 3 independent experiments using 3 separate batches of saRNA. P<0.05 repeated measures ANOVA compared to construct with no IIP.

### Example 3—Construction and Testing RNA Constructs Comprising a Viral Innate Inhibitor Protein (IIP)

[1168] The inventors designed, constructed and then tested a series of diverse viral IIPs, and the results of the expression studies are shown in FIG. 12.

[1169] Referring to FIG. 12, there is shown n-Luc expression in HeLa cells following transfection with RNA containing IIP in F-T2A configuration relative to expression in HEK293T/17 cells. Details of experimental methods are provided in FIG. 6. Data shown are constructs providing a greater than 2-fold increase in luciferase expression and are mean±SEM of data obtained in 3 independent experiments using 3 separate batches of RNA.

### CONCLUSIONS

[1170] The inventors believe that the constructs described herein display many advantages over those described in the prior art, including:
[1171] i) insertion of nucleotide sequences encoding any of the innate modulatory proteins directly into the RNA construct, such as mRNA or saRNA, enabling dual protein expression of the IIP protein and the biotherapeutic molecule encoded by the gene of interest;
[1172] ii) as opposed to delivering two different and separate strands of RNA, one encoding the gene of interest (GOI), i.e. the therapeutic biomolecule, and one encoding the IIP, a single strand is required to be delivered;
[1173] iii) the IIP inhibits innate sensing of RNA, thus enabling higher protein expression;
[1174] iv) when the RNA construct is a saRNA, the IIP expression itself is self-amplified by virtue of being co-expressed on the sub-genome strand with the GOI; and/or
[1175] v) an increase in both the magnitude and duration of protein expression compared to conventional VEEV RNA replicon constructs.

[1176] Numbered Paragraphs

[1177] The following paragraphs form part of the description and not the claims
[1178] 1. An RNA construct encoding: (i) at least one therapeutic biomolecule; and (ii) at least one viral innate inhibitor protein (IIP).
[1179] 2. The RNA construct according to paragraph 1, wherein the construct is an mRNA, saRNA or a trans-replicon system, most preferably saRNA.
[1180] 3. The RNA construct according to either paragraph 1 or paragraph 2, wherein the construct comprises or is derived from a positive stranded RNA virus selected from the group of genus consisting of: alphavirus; picornavirus; flavivirus; rubivirus; pestivirus; hepacivirus; calicivirus and coronavirus, preferably an alphavirus, optionally VEEV.
[1181] 4. The RNA construct according to any preceding paragraph, wherein the at least one innate inhibitor protein (IIP) is HPV E6 or HSV ICP34.5, or an orthologue thereof.
[1182] 5. The RNA construct according to any one of paragraphs 1-3, wherein the at least one innate inhibitor protein (IIP) is HCV E2 or HCV NS5a, or an orthologue thereof.
[1183] 6. The RNA construct according to any one of paragraphs 1-3, wherein the at least one innate inhibitor protein (IIP) is VACV E3L or VACV K3L, or an orthologue thereof.
[1184] 7. The RNA construct according to any one of paragraphs 1-3, wherein the at least one innate inhibitor protein (IIP) is MERS ORF8B, or an orthologue thereof.
[1185] 8. The RNA construct according to any one of paragraphs 1-3, wherein the at least one innate inhibitor protein (IIP) is KSHV ORF52, or an orthologue thereof.
[1186] 9. The RNA construct according to any one of paragraphs 1-3, wherein the at least one innate inhibitor protein (IIP) is Ebola VP35, or an orthologue thereof.
[1187] 10. The RNA construct according to any one of paragraphs 1-3, wherein the at least one innate inhibitor protein (IIP) is Vaccinia C6, or an orthologue thereof.
[1188] 11. The RNA construct according to any one of paragraphs 1-3, wherein the at least one innate inhibitor protein (IIP) is an ORF3b*57 variant of the wild type of SARS-CoV-2 ORF3b, or an orthologue thereof.
[1189] 12. The RNA construct according to any one of paragraphs 1-3, wherein the at least one innate inhibitor protein (IIP) is an ORF3b*79 variant of the wild type of SARS-CoV-2 ORF3b, or an orthologue thereof.
[1190] 13. The RNA construct according to any one of paragraphs 1-3, wherein the at least one innate inhibitor protein (IIP) is an ORF3b*57 Ecuador variant of the wild type of SARS-CoV-2 ORF3b, or an orthologue thereof.
[1191] 14. The RNA construct according to any preceding paragraph, wherein the therapeutic biomolecule comprises a therapeutic protein, preferably the protein or peptide is an antigen, and more preferably a viral antigen.
[1192] 15. A nucleic acid sequence encoding the RNA construct according to any preceding paragraph.
[1193] 16. An expression cassette comprising a nucleic acid sequence according to paragraph 15.
[1194] 17 A recombinant vector comprising the expression cassette according to paragraph 16.
[1195] 18. A pharmaceutical composition comprising the RNA construct according to any one of paragraphs 1 to 14, the nucleic acid sequence according to paragraph 15, the expression cassette according to paragraph 16 or the vector according to paragraph 17, and a pharmaceutically acceptable vehicle.
[1196] 19. A method of preparing the RNA construct according to any one of paragraphs 1 to 14, the method comprising:
   [1197] a) i) introducing, into a host cell, the vector according to paragraph 17; and
   [1198] ii) culturing the host cell under conditions to result in the production of the RNA construct according to any one of paragraphs 1 to 14; or
   [1199] b) transcribing the RNA construct from the vector according to paragraph 17.
[1200] 20. The RNA construct according to any one of paragraphs 1 to 14, the nucleic acid sequence according to paragraph 15, the expression cassette according to paragraph 16 or the vector according to paragraph 17 or the pharmaceutical composition according to paragraph 18, for use as a medicament or in therapy.
[1201] 21. The RNA construct according to any one of paragraphs 1 to 14, the nucleic acid sequence according to paragraph 15, the expression cassette according to paragraph 16 or the vector according to paragraph 17 or the pharmaceutical composition according to paragraph 18, for use in the prevention, amelioration or treatment of a protozoan, fungal, bacterial or viral infection.
[1202] 22. The RNA construct according to any one of paragraphs 1 to 14, the nucleic acid sequence according to paragraph 15, the expression cassette according to paragraph 16, the vector according to paragraph 17 or the pharmaceutical composition according to paragraph 18, for use in the prevention, amelioration or treatment of cancer.
[1203] 23. A vaccine comprising the RNA construct according to any one of paragraphs 1 to 14, the nucleic acid sequence according to paragraph 15, the expression cassette according to paragraph 16, the vector according to paragraph 17 or the pharmaceutical composition according to paragraph 18.
[1204] 24. The RNA construct according to any one of paragraphs 1 to 14, the nucleic acid sequence according to paragraph 15, the expression cassette according to paragraph 16, the vector according to paragraph 17 or the pharmaceutical composition according to paragraph 18, for use in stimulating an immune response in a subject.

1. An RNA construct encoding: (i) at least one therapeutic biomolecule; and (ii) at least one viral innate inhibitor protein (IIP).

2. The RNA construct according to claim 1, wherein the construct is a mRNA molecule.

3. The RNA construct according to claim 1, wherein the construct is a saRNA molecule.

4. The RNA construct according to claim 1, wherein the construct comprises or is derived from a positive stranded RNA virus selected from the group of genus consisting of: alphavirus; picornavirus; flavivirus; rubivirus; pestivirus; hepacivirus; calicivirus and coronavirus, preferably an alphavirus, optionally VEEV.

5. The RNA construct according to claim 1, wherein the at least one innate inhibitor protein (IIP) is:
(i) HPV16 E6, or an orthologue thereof,
(ii) HSV ICP34.5, or an orthologue thereof,
(iii) HCV E2, or an orthologue thereof,
(iv) HCV NS5a, or an orthologue thereof,
(i) VACV E3L, or an orthologue thereof,
(ii) VACV K3L, or an orthologue thereof,
(iii) MERS ORF8B, or an orthologue thereof,
(iv) KSHV ORF52, or an orthologue thereof, and/or
(v) Ebola VP35, or an orthologue thereof.

6. The RNA construct according to claim 1, wherein the at least one innate inhibitor protein (IIP) is Vaccinia C6, or an orthologue thereof.

7. The RNA construct according to claim 1, wherein the at least one innate inhibitor protein (IIP) is EV71-2Apro, or an orthologue thereof.

8. The RNA construct according to claim 1, wherein the at least one innate inhibitor protein (IIP) is BVDV nPro, or an orthologue thereof.

9. The RNA construct according to claim 1, wherein the at least one innate inhibitor protein (IIP) is HSV Us1, or an orthologue thereof.

10. The RNA construct according to claim 1, wherein the at least one innate inhibitor protein (IIP) is Simian Virus 5 (PIV5 Non-structural protein V), or an orthologue thereof.

11. The RNA construct according to claim 1, wherein the at least one innate inhibitor protein (IIP) is (i) an ORF3b*57 variant of the wild type of SARS-CoV-2 ORF3b, or an orthologue thereof, or (ii) an ORF3b*57 Ecuador variant of the wild type of SARS-CoV-2 ORF3b, or an orthologue thereof.

12. The RNA construct according to claim 1, wherein the at least one innate inhibitor protein (IIP) is: (i) an ORF3b*57 Pangolin variant of the wild type of SARS-CoV-2 ORF3b, or an orthologue thereof, or (ii) an ORF3b*79 variant of the wild type of SARS-CoV-2 ORF3b, or an orthologue thereof.

13. The RNA construct according to claim 1, wherein the at least one innate inhibitor protein (IIP) is an ORF3b*79 Pangolin variant of the wild type of SARS-CoV-2 ORF3b, or an orthologue thereof.

14. The RNA construct according to claim 1, wherein the therapeutic biomolecule comprises a therapeutic protein, preferably the protein or peptide is an antigen, and more preferably a viral antigen.

15. A nucleic acid sequence encoding the RNA construct according to claim 1.

16-24. (canceled)

The application's sequence listing, which the Patent Office published only in electronic form, follows.

SEQUENCE LISTING (459 sequences)

SEQ ID NO: 1 - protein, 158 aa, Human papillomavirus type 16
MHQKRTAMFQDPQERPRKLPQLCTELQTTIHDIILECVYCKQQLLRREVYDFAFRDLCIVYRDGNPYAVCDKCLKFYSKISEYRHYCYSLYGTTLEQQYNKPLCDLLIRCINCQKPLCPEEKQRHLDKKQRFHNIRGRWTGRCMSCCRSSRTRRETQL

SEQ ID NO: 2 - DNA, 474 bp, Human papillomavirus type 16
atgcaccaaaagagaactgcaatgtttcaggacccacaggagcgacccagaaagttaccacagttatgcacagagctgcaaacaactatacatgatataatattagaatgtgtgtactgcaagcaacagttactgcgacgtgaggtatatgactttgcttttcgggatttatgcatagtatatagagatgggaatccatatgctgtatgtgataaatgtttaaagttttattctaaaattagtgagtatagacattattgttatagtttgtatggaacaacattagaacagcaatacaacaaaccgttgtgtgatttgttaattaggtgtattaactgtcaaaagccactgtgtcctgaagaaaagcaaagacatctggacaaaaagcaaagattccataatataaggggtcggtggaccggtcgatgtatgtcttgttgcagatcatcaagaacacgtagagaaacccagctg

SEQ ID NO: 3 - RNA, 474 nt, Human papillomavirus type 16
augcaccaaaagagaacugcaauguuucaggacccacaggagcgacccagaaaguuaccacaguuaugcacagagcugcaaacaacuauacaugauauaauauuagaauguguguacugcaagcaacaguuacugcgacgugagguauaugacuuugcuuuucgggauuuaugcauaguauauagagaugggaauccauaugcuguaugugauaaauguuuaaaguuuuauucuaaaauuagugaguauagacauuauuguuauaguuuguauggaacaacauuagaacagcaauacaacaaaccguugugugauuuguuaauuagguguauuaacugucaaaagccacuguguccugaagaaaagcaaagacaucuggacaaaaagcaaagauuccauaauauaaggggucgguggaccggucgauguaugucuuguugcagaucaucaagaacacguagagaaacccagcug

SEQ ID NO: 4 - DNA, 477 bp, Artificial Sequence
  Codon optimised DNA encoding HPV16 E6 protein
atgcaccagaaacggaccgccatgttccaggatcctcaagagaggcccagaaagctgcctcagctgtgtaccgagctgcagaccaccatccacgacatcatcctggaatgcgtgtactgcaagcagcagctcctgcggagagaggtgtacgatttcgccttccgggacctgtgcatcgtgtacagagatggcaacccctacgccgtgtgcgacaagtgcctgaagttctacagcaagatcagcgagtaccggcactactgctacagcctgtacggcaccacactggaacagcagtacaacaagcccctgtgcgacctgctgatccggtgcatcaactgccagaaacctctgtgccccgaggaaaagcagcggcacctggacaagaagcagcggttccacaacatcagaggccggtggaccggcagatgcatgagctgttgtcggagcagcagaaccagacgggaaacccagctgtga

SEQ ID NO: 5 - RNA, 477 nt, Artificial Sequence
  Codon optimised RNA encoding HPV16 E6 protein
augcaccagaaacggaccgccauguuccaggauccucaagagaggcccagaaagcugccucagcuguguaccgagcugcagaccaccauccacgacaucauccuggaaugcguguacugcaagcagcagcuccugcggagagagguguacgauuucgccuuccgggaccugugcaucguguacagagauggcaaccccuacgccgugugcgacaagugccugaaguucuacagcaagaucagcgaguaccggcacuacugcuacagccuguacggcaccacacuggaacagcaguacaacaagccccugugcgaccugcugauccggugcaucaacugccagaaaccucugugccccgaggaaaagcagcggcaccuggacaagaagcagcgguuccacaacaucagaggccgguggaccggcagaugcaugagcuguugucggagcagcagaaccagacgggaaacccagcuguga

SEQ ID NO: 6 - protein, 248 aa, human herpesvirus 1
MARRRRHRGPRRPRPPGPTGAVPTAQSQVTSTPNSEPAVRSAPAAAPPPPPAGGPPPSCSLLLRQWLHVPESASDDDDDDDWPDSPPPEPAPEARPTAAAPRPRPPPPGVGPGGGADPSHPPSRPFRLPPRLALRLRVTAEHLARLRLRRAGGEGAPEPPATPATPATPATPATPARVRFSPHVRVRHLVVWASAARLARRGSWARERADRARFRRRVAEAEAVIGPCLGPEARARALARGAGPANSV

SEQ ID NO: 7 - DNA, 744 bp, human herpesvirus 1
atggcccgccgccgccgccatcgcggcccccgccgcccccggccgcccgggcccacgggcgccgtcccaaccgcacagtcccaggtaacctccacgcccaactcggaacccgcggtcaggagcgcgcccgcggccgccccgccgccgccccccgccggtgggcccccgccttcttgttcgctgctgctgcgccagtggctccacgttcccgagtccgcgtccgacgacgacgatgacgacgactggccggacagccccccgcccgagccggcgccagaggcccggcccaccgccgccgccccccggccccggcccccaccgcccggcgtgggcccggggggcggggctgacccctcccaccccccctcgcgccccttccgccttccgccgcgcctcgccctccgcctgcgcgtcaccgcggagcacctggcgcgcctgcgcctgcgacgcgcgggcggggagggggcgccggagccccccgcgacccccgcgacccccgcgacccccgcgacccccgcgacccccgcgcgggtgcgcttctcgccccacgtccgggtgcgccacctggtggtctgggcctcggccgcccgcctggcgcgccgcggctcgtgggcccgcgagcgggccgaccgggctcggttccggcgccgggtggcggaggccgaggcggtcatcgggccgtgcctggggcccgaggcccgtgcccgggccctggcccgcggagccggcccggcgaactcggtc

SEQ ID NO: 8 - RNA, 744 nt, human herpesvirus 1
auggcccgccgccgccgccaucgcggcccccgccgcccccggccgcccgggcccacgggcgccgucccaaccgcacagucccagguaaccuccacgcccaacucggaacccgcggucaggagcgcgcccgcggccgccccgccgccgccccccgccggugggcccccgccuucuuguucgcugcugcugcgccaguggcuccacguucccgaguccgcguccgacgacgacgaugacgacgacuggccggacagccccccgcccgagccggcgccagaggcccggcccaccgccgccgccccccggccccggcccccaccgcccggcgugggcccggggggcggggcugaccccucccacccccccucgcgccccuuccgccuuccgccgcgccucgcccuccgccugcgcgucaccgcggagcaccuggcgcgccugcgccugcgacgcgcgggcggggagggggcgccggagccccccgcgacccccgcgacccccgcgacccccgcgacccccgcgacccccgcgcgggugcgcuucucgccccacguccgggugcgccaccugguggucugggccucggccgcccgccuggcgcgccgcggcucgugggcccgcgagcgggccgaccgggcucgguuccggcgccggguggcggaggccgaggcggucaucgggccgugccuggggcccgaggcccgugcccgggcccuggcccgcggagccggcccggcgaacucgguc

SEQ ID NO: 9 - DNA, 747 bp, Artificial Sequence
  Codon optimised DNA encoding HSV ICP34.5 protein
atggccagaagaaggcggcacagaggacccagaaggcctagacctcctggaccaacaggtgccgttcctaccgctcagagccaagtgaccagcacacccaattctgaacctgccgtcagaagcgcccctgctgctgctcctccacctccaccagctggcggacctccaccttcttgttctctgctgctgagacagtggctgcacgtgccagagtccgcctccgacgatgatgacgatgacgactggcctgacagccctcctccagaacctgctcctgaagccagacctacagccgctgctcctagacctagaccaccacctccaggtgttggacctggtggcggagctgatccttctcaccctcctagcagacccttccggcttcctcctagactggccctgagactgagagtgacagccgaacacctggccagactgagacttcgtagagcaggcggagaaggcgctcctgaacctcctgctacaccagccacaccagctactcccgcaactcctgccactcctgctagagtgcggtttagccctcacgtccgcgtcagacatctggtcgtttgggcctctgctgcccggcttgctagaagaggatcttgggccagagagagagccgaccgggctagatttcggagaagagtggccgaagccgaggccgtgattggaccttgtcttggccctgaagctcgggctagagcacttgctagaggtgccggacctgccaacagcgtgtga

SEQ ID NO: 10 - RNA, 747 nt, Artificial Sequence
  Codon optimised RNA encoding HSV ICP34.5 protein
auggccagaagaaggcggcacagaggacccagaaggccuagaccuccuggaccaacaggugccguuccuaccgcucagagccaagugaccagcacacccaauucugaaccugccgucagaagcgccccugcugcugcuccuccaccuccaccagcuggcggaccuccaccuucuuguucucugcugcugagacaguggcugcacgugccagaguccgccuccgacgaugaugacgaugacgacuggccugacagcccuccuccagaaccugcuccugaagccagaccuacagccgcugcuccuagaccuagaccaccaccuccagguguuggaccugguggcggagcugauccuucucacccuccuagcagacccuuccggcuuccuccuagacuggcccugagacugagagugacagccgaacaccuggccagacugagacuucguagagcaggcggagaaggcgcuccugaaccuccugcuacaccagccacaccagcuacucccgcaacuccugccacuccugcuagagugcgguuuagcccucacguccgcgucagacaucuggucguuugggccucugcugcccggcuugcuagaagaggaucuugggccagagagagagccgaccgggcuagauuucggagaagaguggccgaagccgaggccgugauuggaccuugucuuggcccugaagcucgggcuagagcacuugcuagaggugccggaccugccaacagcguguga

SEQ ID NO: 11 - protein, 364 aa, Hepatitis C virus
METHVTGGSAGHTVSGFVSLLAPGAKQNVQLINTNGSWHLNSTALNCNDSLNTGWLAGLFYHHKFNSSGCPERLASCRPLTDFDQGWGPISYANGSGPDQRPYCWHYPPKPCGIVPAKSVCGPVYCFTPSPVVVGTTDRSGAPTYSWGENDTDVFVLNNTRPPLGNWFGCTWMNSTGFTKVCGAPPCVIGGAGNNTLHCPTDCFRKHPDATYSRCGSGPWITPRCLVDYPYRLWHYPCTINYTIFKIRMYVGGVEHRLEAACNWTRGERCDLEDRDRSELSPLLLTTTQWQVLPCSFTTLPALSTGLIHLHQNIVDVQYLYGVGSSIASWAIKWEYVVLLFLLLADARVCSCLWMMLLISQAEA

SEQ ID NO: 12 - DNA, 1092 bp, Hepatitis C virus
atggaaacccacgtcaccgggggaagtgccggccacactgtgtctggatttgttagcctcctcgcaccaggcgccaagcagaacgtccagctgatcaacaccaacggcagttggcacctcaatagcacggccctgaactgcaatgatagccttaacaccggctggttagcagggcttttctatcaccacaagttcaactcttcaggctgtcctgagaggctagccagctgccgaccccttaccgattttgaccagggctggggccctatcagttatgccaacggaagcggccccgaccagcgcccctactgctggcactacccccctaaaccttgcggtgttgtgcccgcgaagagtgtgtgtggtccggtatattgcttcactcccagccccgtggtggtgggaacgaccgacaggtcgggcgcgcctacctacagctggggtgaaaatgatacggacgtcttcgtccttaacaataccaggccaccgctgggcaattggttcggttgtacctggatgaactcaactggattcaccaaagtgtgcggagcgcctccctgtgtcatcggaggggcgggcaacaacaccctgcactgccccactgattgcttccgcaagcatccggacgccacatactctcggtgcggctccggtccctggatcacacccaggtgcctggtcgactacccgtataggctttggcattatccttgtaccatcaactacaccatatttaaaatcaggatgtacgtgggaggggtcgagcacaggctggaagctgcttgcaactggacgcggggcgaacgttgcgatctggaagacagggacaggtccgagctcagcccgttactgctgaccactacacagtggcaggtcctcccgtgttccttcacaaccctgccagccttgtccaccggcctcatccacctccaccagaacattgtggacgtgcagtacttgtacggggtggggtcaagcatcgcgtcctgggccattaagtgggagtacgtcgttctcctgttccttctgcttgcagacgcgcgcgtctgctcctgcttgtggatgatgctactcatatcccaagcggaggcg

SEQ ID NO: 13 - RNA, 1092 nt, Hepatitis C virus
auggaaacccacgucaccgggggaagugccggccacacugugucuggauuuguuagccuccucgcaccaggcgccaagcagaacguccagcugaucaacaccaacggcaguuggcaccucaauagcacggcccugaacugcaaugauagccuuaacaccggcugguuagcagggcuuuucuaucaccacaaguucaacucuucaggcuguccugagaggcuagccagcugccgaccccuuaccgauuuugaccagggcuggggcccuaucaguuaugccaacggaagcggccccgaccagcgccccuacugcuggcacuaccccccuaaaccuugcgguguugugcccgcgaagagugugugugguccgguauauugcuucacucccagccccgugguggugggaacgaccgacaggucgggcgcgccuaccuacagcuggggugaaaaugauacggacgucuucguccuuaacaauaccaggccaccgcugggcaauugguucgguuguaccuggaugaacucaacuggauucaccaaagugugcggagcgccucccugugucaucggaggggcgggcaacaacacccugcacugccccacugauugcuuccgcaagcauccggacgccacauacucucggugcggcuccggucccuggaucacacccaggugccuggucgacuacccguauaggcuuuggcauuauccuuguaccaucaacuacaccauauuuaaaaucaggauguacgugggaggggucgagcacaggcuggaagcugcuugcaacuggacgcggggcgaacguugcgaucuggaagacagggacagguccgagcucagcccguuacugcugaccacuacacaguggcagguccucccguguuccuucacaacccugccagccuuguccaccggccucauccaccuccaccagaacauuguggacgugcaguacuuguacgggguggggucaagcaucgcguccugggccauuaagugggaguacgucguucuccuguuccuucugcuugcagacgcgcgcgucugcuccugcuuguggaugaugcuacucauaucccaagcggaggcg

SEQ ID NO: 14 - DNA, 1095 bp, Artificial Sequence
  Codon optimised DNA encoding HCV E2 protein
atggaaacccacgtgacaggcggatctgccggccatacagtgtccggctttgtgtctcttctggcccctggcgccaagcagaatgtgcagctgatcaacaccaacggcagctggcacctgaacagcacagccctgaactgcaacgacagcctgaataccggatggctggccggcctgttctaccaccacaagttcaatagcagcggctgccccgagagactggcctcttgtagacctctgaccgacttcgatcaaggctggggccctatcagctacgccaatggctctggacctgaccagaggccttactgctggcactaccctccaaagccttgcggaatcgtgcctgccaagtctgtgtgtggccccgtgtactgcttcaccccatctccagtggtcgtgggcaccaccgatagatctggcgccccaacatatagctggggcgagaacgacaccgacgtgttcgtgctgaacaacacccggcctccactcggaaattggttcggctgcacctggatgaactccaccggcttcacaaaagtgtgcggagcccctccttgtgtgattggcggagccggaaacaataccctgcactgccctaccgactgcttcagaaagcaccccgacgccacctacagcagatgtggatctggcccttggatcacccctagatgcctggtggactacccctaccggctgtggcactatccctgcaccatcaactacaccatcttcaagatccgtatgtacgtcggcggcgtggaacacagactggaagccgcctgtaactggaccaggggcgagagatgcgacctggaagatagagacagaagcgagctgagccctctgctgctgaccaccacacagtggcaggtcctgccttgcagcttcaccacactgcctgctctgagcaccggcctgattcatctgcaccagaacatcgtggacgtgcagtacctgtacggcgtgggaagctctattgccagctgggccatcaagtgggagtacgtggtgctgctgttcctgctgctggccgatgccagagtgtgtagctgcctgtggatgatgctgctgatctctcaggccgaggcctga

SEQ ID NO: 15 - RNA, 1095 nt, Artificial Sequence
  Codon optimised RNA encoding HCV E2 protein
auggaaacccacgugacaggcggaucugccggccauacaguguccggcuuugugucucuucuggccccuggcgccaagcagaaugugcagcugaucaacaccaacggcagcuggcaccugaacagcacagcccugaacugcaacgacagccugaauaccggauggcuggccggccuguucuaccaccacaaguucaauagcagcggcugccccgagagacuggccucuuguagaccucugaccgacuucgaucaaggcuggggcccuaucagcuacgccaauggcucuggaccugaccagaggccuuacugcuggcacuacccuccaaagccuugcggaaucgugccugccaagucuguguguggccccguguacugcuucaccccaucuccaguggucgugggcaccaccgauagaucuggcgccccaacauauagcuggggcgagaacgacaccgacguguucgugcugaacaacacccggccuccacucggaaauugguucggcugcaccuggaugaacuccaccggcuucacaaaagugugcggagccccuccuugugugauuggcggagccggaaacaauacccugcacugcccuaccgacugcuucagaaagcaccccgacgccaccuacagcagauguggaucuggcccuuggaucaccccuagaugccugguggacuaccccuaccggcuguggcacuaucccugcaccaucaacuacaccaucuucaagauccguauguacgucggcggcguggaacacagacuggaagccgccuguaacuggaccaggggcgagagaugcgaccuggaagauagagacagaagcgagcugagcccucugcugcugaccaccacacaguggcagguccugccuugcagcuucaccacacugccugcucugagcaccggccugauucaucugcaccagaacaucguggacgugcaguaccuguacggcgugggaagcucuauugccagcugggccaucaagugggaguacguggugcugcuguuccugcugcuggccgaugccagaguguguagcugccuguggaugaugcugcugaucucucaggccgaggccuga

SEQ ID NO: 16 - protein, 449 aa, Hepatitis C virus
MSGSWLRDIWDWICEVLSDFKTWLKAKLMPQLPGIPFVSCQRGYRGVWRGDGIMHTRCHCGAEITGHVKNGTMRIVGPRTCKNMWSGTFFINAYTTGPCTPLPAPNYKFALWRVSAEEYVEIRRVGDFHYVSGMTTDNLKCPCQIPSPEFFTELDGVRLHRFAPPCKPLLREEVSFRVGLHEYPVGSQLPCEPEPDVAVLTSMLTDPSHITAEAAGRRLARGSPPSMASSSASQLSAPSLKATCTANHDSPDAELIEANLLWRQEMGGNITRVESENKVVILDSFDPLVAEEDEREVSVPAEILRKSRRFAPALPVWARPDYNPLLVETWKKPDYEPPVVHGCPLPPPRSPPVPPPRKKRTVVLTESTLPTALAELATKSFGSSSTSGITGDNTTTSSEPAPSGCPPDSDVESYSSMPPLEGEPGDPDLSDGSWSTVSSGADTEDVVCC

SEQ ID NO: 17 - DNA, 1347 bp, Hepatitis C virus
atgtccggttcctggctaagggacatctgggactggatatgcgaggtgctgagcgactttaagacctggctgaaagccaagctcatgccacaactgcctgggattccctttgtgtcctgccagcgcgggtataggggggtctggcgaggagacggcattatgcacactcgctgccactgtggagctgagatcactggacatgtcaaaaacgggacgatgaggatcgtcggtcctaggacctgcaagaacatgtggagtgggacgttcttcattaatgcctacaccacgggcccctgtactccccttcctgcgccgaactataagttcgcgctgtggagggtgtctgcagaggaatacgtggagataaggcgggtgggggacttccactacgtatcgggcatgactactgacaatctcaaatgcccgtgccagatcccatcgcccgaatttttcacagaattggacggggtgcgcctacataggtttgcgcccccttgcaagcccttgctgcgggaggaggtatcattcagagtaggactccacgagtacccggtggggtcgcaattaccttgcgagcccgaaccggacgtagccgtgttgacgtccatgctcactgatccctcccatataacagcagaggcggccgggagaaggttggcgagagggtcacccccttctatggccagctcctcggctagccagctgtccgctccatctctcaaggcaacttgcaccgccaaccatgactcccctgacgccgagctcatagaggctaacctcctgtggaggcaggagatgggcggcaacatcaccagggttgagtcagagaacaaagtggtgattctggactccttcgatccgcttgtggcagaggaggatgagcgggaggtctccgtacccgcagaaattctgcggaagtctcggagattcgccccagccctgcccgtctgggcgcggccggactacaaccccctgctagtagagacgtggaaaaagcctgactacgaaccacctgtggtccatggctgcccgctaccacctccacggtcccctcctgtgcctccgcctcggaaaaagcgtacggtggtcctcaccgaatcaaccctacctactgccttggccgagcttgccaccaaaagttttggcagctcctcaacttccggcattacgggcgacaatacgacaacatcctctgagcccgccccttctggctgcccccccgactccgacgttgagtcctattcttccatgccccccctggagggggagcctggggatccggatctcagcgacgggtcatggtcgacggtcagtagtggggccgacacggaagatgtcgtgtgctgc

SEQ ID NO: 18 - RNA, 1347 nt, Hepatitis C virus
auguccgguuccuggcuaagggacaucugggacuggauaugcgaggugcugagcgacuuuaagaccuggcugaaagccaagcucaugccacaacugccugggauucccuuuguguccugccagcgcggguauaggggggucuggcgaggagacggcauuaugcacacucgcugccacuguggagcugagaucacuggacaugucaaaaacgggacgaugaggaucgucgguccuaggaccugcaagaacauguggagugggacguucuucauuaaugccuacaccacgggccccuguacuccccuuccugcgccgaacuauaaguucgcgcuguggagggugucugcagaggaauacguggagauaaggcgggugggggacuuccacuacguaucgggcaugacuacugacaaucucaaaugcccgugccagaucccaucgcccgaauuuuucacagaauuggacggggugcgccuacauagguuugcgcccccuugcaagcccuugcugcgggaggagguaucauucagaguaggacuccacgaguacccgguggggucgcaauuaccuugcgagcccgaaccggacguagccguguugacguccaugcucacugaucccucccauauaacagcagaggcggccgggagaagguuggcgagagggucacccccuucuauggccagcuccucggcuagccagcuguccgcuccaucucucaaggcaacuugcaccgccaaccaugacuccccugacgccgagcucauagaggcuaaccuccuguggaggcaggagaugggcggcaacaucaccaggguugagucagagaacaaaguggugauucuggacuccuucgauccgcuuguggcagaggaggaugagcgggaggucuccguacccgcagaaauucugcggaagucucggagauucgccccagcccugcccgucugggcgcggccggacuacaacccccugcuaguagagacguggaaaaagccugacuacgaaccaccugugguccauggcugcccgcuaccaccuccacgguccccuccugugccuccgccucggaaaaagcguacggugguccucaccgaaucaacccuaccuacugccuuggccgagcuugccaccaaaaguuuuggcagcuccucaacuuccggcauuacgggcgacaauacgacaacauccucugagcccgccccuucuggcugcccccccgacuccgacguugaguccuauucuuccaugcccccccuggagggggagccuggggauccggaucucagcgacgggucauggucgacggucaguaguggggccgacacggaagaugucgugugcugc

SEQ ID NO: 19 - DNA, 1350 bp, Artificial Sequence
  Codon optimised DNA encoding HCV NS5a protein
atgtctggcagctggctgagagacatctgggactggatttgcgaggtgctgagcgacttcaagacctggctgaaggccaagctgatgcctcagctgcctggcatccctttcgtgtcctgtcagaggggctatagaggcgtttggagaggcgacggcatcatgcacaccagatgtcactgtggcgccgagatcacaggccacgtgaagaacggcaccatgagaatcgtgggccccagaacctgcaagaatatgtggagcggcaccttcttcatcaacgcctacaccaccggaccttgcacacctctgcctgctcctaactacaagttcgccctgtggcgggtgtccgccgaggaatacgtggaaatcagaagagtgggcgacttccactacgtgtccggcatgaccaccgacaacctgaagtgcccctgtcagatcccatctcctgagttcttcaccgagctggatggcgtgcggctgcacagatttgcccctccatgtaaacccctgctgagagaagaggtgtcctttagagtgggcctgcacgagtaccctgtgggttctcagctcccttgcgagcctgaacctgatgtggccgtgctgacctccatgctgacagacccttctcacatcacagccgaggccgctggaagaaggctggctagaggatctcctcctagcatggcctctagcagcgcctctcaactgtctgccccaagcctgaaagccacctgtaccgccaatcacgacagccctgatgccgagctgatcgaggctaacctgctgtggcggcaagagatgggcggcaacatcaccagagtggaaagcgagaacaaggtggtcatcctggatagcttcgaccctctggtggccgaagaggacgagagggaagtgtctgtgcctgccgagatcctgagaaagagcagaagattcgcccctgctctgcccgtgtgggccagacctgattacaatcccctgctggtggaaacatggaagaagcccgactacgagcctcctgtggtgcacggatgtccactgcctccacctagatctccacctgtgccacctccacggaagaaaagaaccgtggtgctgaccgagagcaccctgcctacagctctggctgagctggccacaaagagctttggcagcagcagcacctctggcatcaccggcgataataccaccaccagctctgagcctgctccaagcggatgtcctcctgactccgacgtggaaagctacagcagcatgcctcctctggaaggcgaacccggcgatcctgatctgtctgatggctcttggagcaccgtgtcctctggcgccgatacagaggatgtcgtgtgctgctga

SEQ ID NO: 20 - RNA, 1350 nt, Artificial Sequence
  Codon optimised RNA encoding HCV NS5a protein
augucuggcagcuggcugagagacaucugggacuggauuugcgaggugcugagcgacuucaagaccuggcugaaggccaagcugaugccucagcugccuggcaucccuuucguguccugucagaggggcuauagaggcguuuggagaggcgacggcaucaugcacaccagaugucacuguggcgccgagaucacaggccacgugaagaacggcaccaugagaaucgugggccccagaaccugcaagaauauguggagcggcaccuucuucaucaacgccuacaccaccggaccuugcacaccucugccugcuccuaacuacaaguucgcccuguggcggguguccgccgaggaauacguggaaaucagaagagugggcgacuuccacuacguguccggcaugaccaccgacaaccugaagugccccugucagaucccaucuccugaguucuucaccgagcuggauggcgugcggcugcacagauuugccccuccauguaaaccccugcugagagaagagguguccuuuagagugggccugcacgaguacccuguggguucucagcucccuugcgagccugaaccugauguggccgugcugaccuccaugcugacagacccuucucacaucacagccgaggccgcuggaagaaggcuggcuagaggaucuccuccuagcauggccucuagcagcgccucucaacugucugccccaagccugaaagccaccuguaccgccaaucacgacagcccugaugccgagcugaucgaggcuaaccugcuguggcggcaagagaugggcggcaacaucaccagaguggaaagcgagaacaagguggucauccuggauagcuucgacccucugguggccgaagaggacgagagggaagugucugugccugccgagauccugagaaagagcagaagauucgccccugcucugcccgugugggccagaccugauuacaauccccugcugguggaaacauggaagaagcccgacuacgagccuccuguggugcacggauguccacugccuccaccuagaucuccaccugugccaccuccacggaagaaaagaaccguggugcugaccgagagcacccugccuacagcucuggcugagcuggccacaaagagcuuuggcagcagcagcaccucuggcaucaccggcgauaauaccaccaccagcucugagccugcuccaagcggauguccuccugacuccgacguggaaagcuacagcagcaugccuccucuggaaggcgaacccggcgauccugaucugucugauggcucuuggagcaccguguccucuggcgccgauacagaggaugucgugugcugcuga

SEQ ID NO: 21 - protein, 190 aa, Vaccinia virus
MSKIYIDERSDAEIVCAAIKNIGIEGATAAQLTRQLNMEKREVNKALYDLQRSAMVYSSDDIPPRWFMTTEADKPDADAMADVIIDDVSREKSMREDHKSFDDVIPAKKIIDWKDANPVTIINEYCQITKRDWSFRIESVGPSNSPTFYACVDIDGRVFDKADGKSKRDAKNNAAKLAVDKLLGYVIIRF

SEQ ID NO: 22 - DNA, 570 bp, Vaccinia virus
atgtctaagatctatatcgacgagcgttctgacgcagagattgtgtgtgcggctattaaaaacattggaatcgaaggagctactgctgcacaactaactagacaacttaatatggagaagcgagaagttaataaagctctgtacgatcttcaacgtagtgctatggtgtacagctccgacgatattcctcctcgttggtttatgacaacggaggcggataagccggatgctgatgctatggctgacgtcataatagatgatgtatcccgcgaaaaatcaatgagagaggatcataagtcttttgatgatgttattccggctaaaaaaattattgattggaaagatgctaaccctgtcaccattattaatgagtactgccaaataactaagagagattggtcttttcgtattgaatcagttgggcctagtaactctcctacattttatgcctgtgtagatatcgacggaagagtattcgataaggccgatggaaaatctaaacgagatgctaaaaataatgcagctaaattggctgtagataaacttcttgggtacgtcatcattagattc

SEQ ID NO: 23 - RNA, 570 nt, Vaccinia virus
augucuaagaucuauaucgacgagcguucugacgcagagauugugugugcggcuauuaaaaacauuggaaucgaaggagcuacugcugcacaacuaacuagacaacuuaauauggagaagcgagaaguuaauaaagcucuguacgaucuucaacguagugcuaugguguacagcuccgacgauauuccuccucguugguuuaugacaacggaggcggauaagccggaugcugaugcuauggcugacgucauaauagaugauguaucccgcgaaaaaucaaugagagaggaucauaagucuuuugaugauguuauuccggcuaaaaaaauuauugauuggaaagaugcuaacccugucaccauuauuaaugaguacugccaaauaacuaagagagauuggucuuuucguauugaaucaguugggccuaguaacucuccuacauuuuaugccuguguagauaucgacggaagaguauucgauaaggccgauggaaaaucuaaacgagaugcuaaaaauaaugcagcuaaauuggcuguagauaaacuucuuggguacgucaucauuagauuc

SEQ ID NO: 24 - DNA, 573 bp, Artificial Sequence
  Codon optimised DNA encoding VACV E3L protein
atgagcaagatctacatcgacgagcggagcgacgccgagattgtgtgtgccgccatcaagaacatcggcatcgaaggcgctacagccgctcagctgaccagacagctgaacatggaaaagcgggaagtgaacaaggccctgtacgacctgcagagaagcgccatggtgtacagcagcgacgacatccctcctcggtggtttatgaccacagaggccgacaagcccgacgccgatgctatggccgatgtgatcatcgacgacgtgtcccgcgagaagtccatgagagaggaccacaagagcttcgatgacgtgatccccgccaagaagatcatcgattggaaggacgccaatcctgtgaccatcatcaacgagtactgccagatcaccaagcgcgactggtccttcagaatcgagagcgtgggccccagcaacagccctaccttttatgcctgcgtggacatcgacggccgggtgttcgataaggccgatggcaagagcaagcgggacgccaaaaacaacgccgccaaactggccgtggataagctgctgggctacgtgatcatccggttctga

SEQ ID NO: 25 - RNA, 573 nt, Artificial Sequence
  Codon optimised RNA encoding VACV E3L protein
augagcaagaucuacaucgacgagcggagcgacgccgagauugugugugccgccaucaagaacaucggcaucgaaggcgcuacagccgcucagcugaccagacagcugaacauggaaaagcgggaagugaacaaggcccuguacgaccugcagagaagcgccaugguguacagcagcgacgacaucccuccucggugguuuaugaccacagaggccgacaagcccgacgccgaugcuauggccgaugugaucaucgacgacgugucccgcgagaaguccaugagagaggaccacaagagcuucgaugacgugauccccgccaagaagaucaucgauuggaaggacgccaauccugugaccaucaucaacgaguacugccagaucaccaagcgcgacugguccuucagaaucgagagcgugggccccagcaacagcccuaccuuuuaugccugcguggacaucgacggccggguguucgauaaggccgauggcaagagcaagcgggacgccaaaaacaacgccgccaaacuggccguggauaagcugcugggcuacgugaucauccgguucuga

SEQ ID NO: 26 - protein, 88 aa, Vaccinia virus
MLAFCYSLPNAGDVIKGRVYEKDYALYIYLFDYPHSEAILAESVKMHMDRYVEYRDKLVGKTVKVKVIRVDYTKGYIDVNYKRMCRHQ

SEQ ID NO: 27 - DNA, 264 bp, Vaccinia virus
atgcttgcattttgttattcgttgcccaatgcgggcgatgtaataaagggcagagtatacgagaaggattatgctctatacatttatctttttgactatcctcactctgaagctatcttggcagagagtgttaagatgcatatggatagatatgttgaatatagggataaactggtagggaaaactgtaaaagttaaagtgattagagttgattatacaaaaggatatatagatgtcaattacaaaaggatgtgtagacatcaa

SEQ ID NO: 28 - RNA, 264 nt, Vaccinia virus
augcuugcauuuuguuauucguugcccaaugcgggcgauguaauaaagggcagaguauacgagaaggauuaugcucuauacauuuaucuuuuugacuauccucacucugaagcuaucuuggcagagaguguuaagaugcauauggauagauauguugaauauagggauaaacugguagggaaaacuguaaaaguuaaagugauuagaguugauuauacaaaaggauauauagaugucaauuacaaaaggauguguagacaucaa

SEQ ID NO: 29 - DNA, 267 bp, Artificial Sequence
  Codon optimised DNA encoding VACV K3L protein
atgctggccttctgctacagcctgcctaatgccggcgacgtgatcaagggcagagtgtacgagaaggactacgccctgtacatctacctgttcgactaccctcacagcgaggccatcctggccgagtctgtgaagatgcacatggacagatacgtggaataccgggacaagctcgtgggcaagaccgtgaaagtgaaagtcatcagagtggactacaccaagggctacatcgacgtgaactacaagcggatgtgcaggcaccagtga

SEQ ID NO: 30 - RNA, 267 nt, Artificial Sequence
  Codon optimised RNA encoding VACV K3L protein
augcuggccuucugcuacagccugccuaaugccggcgacgugaucaagggcagaguguacgagaaggacuacgcccuguacaucuaccuguucgacuacccucacagcgaggccauccuggccgagucugugaagaugcacauggacagauacguggaauaccgggacaagcucgugggcaagaccgugaaagugaaagucaucagaguggacuacaccaagggcuacaucgacgugaacuacaagcggaugugcaggcaccaguga

SEQ ID NO: 31 - protein, 151 aa, Vaccinia virus
MNAYNKADSFSLESDSIKDVIHDYICWLSMTDEMRPSIGNVFKAMETFKIDAVRYYDGNIYELAKDINAMSFDGFIRSLQTIASKKDKLTVYGTMGLLSIVVDINKGCDISNIKFAAGIIILMEYIFDDTDMSHLKVALYRRIQRRDDVDR

SEQ ID NO: 32 - DNA, 453 bp, Vaccinia virus
atgaatgcgtataataaagccgattcgttttctttagagtctgattctatcaaagatgttatacacgattatatttgttggctcagtatgactgatgaaatgagaccatctatcggaaacgtctttaaagcgatggaaacgtttaagatagacgcggttagatattacgatggtaacatatatgaattagctaaagatataaatgcgatgtcgtttgacggttttataagatctctacaaactatcgcttcaaagaaagataaactcactgtttatggaaccatgggactgctgtctattgtcgtagatattaacaaaggttgtgatatatccaatatcaagttcgctgccggaataatcattttaatggagtatatttttgatgacacggatatgtctcatcttaaagtagcactctatcgtagaatacagagacgtgatgatgtagataga

SEQ ID NO: 33 - RNA, 453 nt, Vaccinia virus
augaaugcguauaauaaagccgauucguuuucuuuagagucugauucuaucaaagauguuauacacgauuauauuuguuggcucaguaugacugaugaaaugagaccaucuaucggaaacgucuuuaaagcgauggaaacguuuaagauagacgcgguuagauauuacgaugguaacauauaugaauuagcuaaagauauaaaugcgaugucguuugacgguuuuauaagaucucuacaaacuaucgcuucaaagaaagauaaacucacuguuuauggaaccaugggacugcugucuauugucguagauauuaacaaagguugugauauauccaauaucaaguucgcugccggaauaaucauuuuaauggaguauauuuuugaugacacggauaugucucaucuuaaaguagcacucuaucguagaauacagagacgugaugauguagauaga

SEQ ID NO: 34 - DNA, 456 bp, Artificial Sequence
  Codon optimised DNA encoding Vaccinia C6 protein
atgaacgcctacaacaaggccgacagcttcagcctggaaagcgacagcatcaaggacgtgatccacgactacatctgctggctgagcatgaccgacgagatgaggcccagcatcggcaacgtgttcaaggccatggaaaccttcaagatcgacgccgtgcggtactacgacggcaacatctatgagctggccaaggacatcaacgccatgagcttcgacggcttcatcagaagcctgcagacaatcgccagcaagaaagacaagctgaccgtgtacggcaccatgggcctgctgtctatcgtggtggatatcaacaagggctgcgacatcagcaacatcaagttcgccgctggcatcatcatcctgatggagtacatcttcgacgacaccgacatgagccacctgaaggtggccctgtacagaagaatccagcggagggacgacgtggacagatga

SEQ ID NO: 35 - RNA, 456 nt, Artificial Sequence
  Codon optimised RNA encoding Vaccinia C6 protein
augaacgccuacaacaaggccgacagcuucagccuggaaagcgacagcaucaaggacgugauccacgacuacaucugcuggcugagcaugaccgacgagaugaggcccagcaucggcaacguguucaaggccauggaaaccuucaagaucgacgccgugcgguacuacgacggcaacaucuaugagcuggccaaggacaucaacgccaugagcuucgacggcuucaucagaagccugcagacaaucgccagcaagaaagacaagcugaccguguacggcaccaugggccugcugucuaucgugguggauaucaacaagggcugcgacaucagcaacaucaaguucgccgcuggcaucaucauccugauggaguacaucuucgacgacaccgacaugagccaccugaagguggcccuguacagaagaauccagcggagggacgacguggacagauga

SEQ ID NO: 36 - protein, 143 aa, Middle East Respiratory Syndrome virus
MPIPPLRKMLGIGGDRTEKLIPGMELSNWLPGGTSTTLELDPKQHSHSGLLRMASFGSMKMAPLMLLQLLGRGTLTMIQLLLHNSRPVLSFLKTSTLRGLEAIVNHLQEPLAQAETLPDLVHKVQDQETLPAALLQVHLESEQ

SEQ ID NO: 37 - DNA, 429 bp, Middle East Respiratory Syndrome virus
atgccaattccacccctgcgcaaaatgctgggtattggcggagacaggacagaaaaattaataccgggaatggaattaagcaactggctcccaggtggtacttctactacactggaactggacccgaagcagcactcccattccgggctgttaaggatggcatcgtttgggtccatgaagatggcgccactgatgctccttcaacttttgggacgcggaaccctaacaatgattcagctattgttacacaattcgcgcccggtactaagcttcctaaaaacttccacattgaggggactggaggcaatagtcaatcatcttcaagagcctctagcgcaagcagaaactcttccagatctagttcacaaggttcaagatcaggaaactctacccgcggcacttctccaggtccatctggaatcggagcag

SEQ ID NO: 38 - RNA, 429 nt, Middle East Respiratory Syndrome virus
augccaauuccaccccugcgcaaaaugcuggguauuggcggagacaggacagaaaaauuaauaccgggaauggaauuaagcaacuggcucccaggugguacuucuacuacacuggaacuggacccgaagcagcacucccauuccgggcuguuaaggauggcaucguuuggguccaugaagauggcgccacugaugcuccuucaacuuuugggacgcggaacccuaacaaugauucagcuauuguuacacaauucgcgcccgguacuaagcuuccuaaaaacuuccacauugaggggacuggaggcaauagucaaucaucuucaagagccucuagcgcaagcagaaacucuuccagaucuaguucacaagguucaagaucaggaaacucuacccgcggcacuucuccagguccaucuggaaucggagcag

SEQ ID NO: 39 - DNA, 432 bp, Artificial Sequence
  Codon optimised DNA encoding MERS ORF8b protein
atgcccattcctccactgagaaagatgctcggcatcggcggcgacagaaccgagaagctgatccctggcatggaactgagcaactggctgcctggcggcaccagcacaacactggaactggatcctaagcagcacagccacagcggcctgctgagaatggccagctttggcagcatgaagatggcccctctgatgctgctgcagctgctcggaagaggcaccctgacaatgatccagctgctgctccacaacagcagacccgtgctgagcttcctgaaaaccagcacactgagaggcctggaagccatcgtgaaccatctgcaagagcccctggctcaggccgagacactgcctgatctggtgcacaaggtgcaggaccaagaaaccctgcctgccgctctgctgcaggtccacctggaatctgagcagtga

SEQ ID NO: 40 - RNA, 432 nt, Artificial Sequence
  Codon optimised RNA encoding MERS ORF8b protein
augcccauuccuccacugagaaagaugcucggcaucggcggcgacagaaccgagaagcugaucccuggcauggaacugagcaacuggcugccuggcggcaccagcacaacacuggaacuggauccuaagcagcacagccacagcggccugcugagaauggccagcuuuggcagcaugaagauggccccucugaugcugcugcagcugcucggaagaggcacccugacaaugauccagcugcugcuccacaacagcagacccgugcugagcuuccugaaaaccagcacacugagaggccuggaagccaucgugaaccaucugcaagagccccuggcucaggccgagacacugccugaucuggugcacaaggugcaggaccaagaaacccugccugccgcucugcugcagguccaccuggaaucugagcaguga

SEQ ID NO: 41 - protein, 131 aa, Kaposi's sarcoma-associated herpesvirus
MAAPRGRPKKDLTMEDLTAKISQLTVENRELRKALGSTADPRDRPLTATEKEAQLTATVGALSAAAAKKIEARVRTIFSKVVTQKQVDDALKGLSLRIDVCMSDGGTAKPPPGANNRRRRGASTTRAGVDD

SEQ ID NO: 42 - DNA, 393 bp, Kaposi's sarcoma-associated herpesvirus
atggccgcgcccaggggcagacccaaaaaggaccttacgatggaagacctaaccgcaaagataagccaattgactgtggagaatcgggagcttcggaaagcactgggatccactgccgatccgagagatcggcctctgacggccaccgagaaggaagcgcagcttaccgctactgtgggtgcactgagtgcggcggccgctaagaaaatcgaagccagggtcaggacaatattcagcaaggttgtaacacaaaagcaagtggacgatgccctgaagggactttcgcttagaatcgacgtctgcatgtcagacgggggcaccgctaaaccgcctcctggtgccaataacaggcgacgaagaggagcctcgacaacacgggcgggggttgatgac

SEQ ID NO: 43 - RNA, 393 nt, Kaposi's sarcoma-associated herpesvirus
auggccgcgcccaggggcagacccaaaaaggaccuuacgauggaagaccuaaccgcaaagauaagccaauugacuguggagaaucgggagcuucggaaagcacugggauccacugccgauccgagagaucggccucugacggccaccgagaaggaagcgcagcuuaccgcuacugugggugcacugagugcggcggccgcuaagaaaaucgaagccagggucaggacaauauucagcaagguuguaacacaaaagcaaguggacgaugcccugaagggacuuucgcuuagaaucgacgucugcaugucagacgggggcaccgcuaaaccgccuccuggugccaauaacaggcgacgaagaggagccucgacaacacgggcggggguugaugac

SEQ ID NO: 44 - DNA, 396 bp, Artificial Sequence
  Codon optimised DNA encoding KSHV ORF52 protein
atggctgctcctagaggcagacccaagaaagacctgaccatggaagatctgaccgccaagatcagccagctgaccgtggaaaacagagagctgagaaaggccctgggcagcaccgccgatcctagagatagacctctgacagccaccgagaaagaggcccagctgacagctacagtgggagccctttctgccgccgctgccaagaaaattgaagccagagtgcggaccatcttcagcaaggtggtcacccagaaacaggtggacgatgccctgaagggcctgagcctgagaatcgacgtgtgtatgtctgacggcggcaccgccaaacctccacctggcgctaacaacagaagaagaagaggcgccagcaccaccagagctggcgtggacgattga

SEQ ID NO: 45 - RNA, 396 nt, Artificial Sequence
  Codon optimised RNA encoding KSHV ORF52 protein
auggcugcuccuagaggcagacccaagaaagaccugaccauggaagaucugaccgccaagaucagccagcugaccguggaaaacagagagcugagaaaggcccugggcagcaccgccgauccuagagauagaccucugacagccaccgagaaagaggcccagcugacagcuacagugggagcccuuucugccgccgcugccaagaaaauugaagccagagugcggaccaucuucagcaagguggucacccagaaacagguggacgaugcccugaagggccugagccugagaaucgacguguguaugucugacggcggcaccgccaaaccuccaccuggcgcuaacaacagaagaagaagaggcgccagcaccaccagagcuggcguggacgauuga

SEQ ID NO: 46 - protein, 340 aa, Ebola virus
MTTRTKGRGHTAATTQNDRMPGPELSGWISEQLMTGRIPVSDIFCDIENNPGLCYASQMQQTKPNPKTRNSQTQTDPICNHSFEEVVQTLASLATVVQQQTIASESLEQRITSLENGLKPVYDMAKTISSLNRVCAEMVAKYDLLVMTTGRATATAAATEAYWAEHGQPPPGPSLYEESAIRGKIESRDETVPQSVREAFNNLNSTTSLTEENFGKPDISAKDLRNIMYDHLPGFGTAFHQLVQVICKLGKDSNSLDIIHAEFQASLAEGDSPQCALIQITKRVPIFQDAAPPVIHIRSRGDIPRACQKSLRPVPPSPKIDRGWVCVFQLQDGKTLGLKI

SEQ ID NO: 47 - DNA, 1020 bp, Ebola virus
atgacaactagaacaaagggcaggggccatactgcggccacgactcaaaacgacagaatgccaggccctgagctttcgggctggatctctgagcagctaatgaccggaagaattcctgtaagcgacatcttctgtgatattgagaacaatccaggattatgctacgcatcccaaatgcaacaaacgaagccaaacccgaagacgcgcaacagtcaaacccaaacggacccaatttgcaatcatagttttgaggaggtagtacaaacattggcttcattggctactgttgtgcaacaacaaaccatcgcatcagaatcattagaacaacgcattacgagtcttgagaatggtctaaagccagtttatgatatggcaaaaacaatctcctcattgaacagggtttgtgctgagatggttgcaaaatatgatcttctggtgatgacaaccggtcgggcaacagcaaccgctgcggcaactgaggcttattgggccgaacatggtcaaccaccacctggaccatcactttatgaagaaagtgcgattcggggtaagattgaatctagagatgagaccgtccctcaaagtgttagggaggcattcaacaatctaaacagtaccacttcactaactgaggaaaattttgggaaacctgacatttcggcaaaggatttgagaaacattatgtatgatcacttgcctggttttggaactgctttccaccaattagtacaagtgatttgtaaattgggaaaagatagcaactcattggacatcattcatgctgagttccaggccagcctggctgaaggagactctcctcaatgtgccctaattcaaattacaaaaagagttccaatcttccaagatgctgctccacctgtcatccacatccgctctcgaggtgacattccccgagcttgccagaaaagcttgcgtccagtcccaccatcgcccaagattgatcgaggttgggtatgtgtttttcagcttcaagatggtaaaacacttggactcaaaatt

SEQ ID NO: 48 - RNA, 1020 nt, Ebola virus
augacaacuagaacaaagggcaggggccauacugcggccacgacucaaaacgacagaaugccaggcccugagcuuucgggcuggaucucugagcagcuaaugaccggaagaauuccuguaagcgacaucuucugugauauugagaacaauccaggauuaugcuacgcaucccaaaugcaacaaacgaagccaaacccgaagacgcgcaacagucaaacccaaacggacccaauuugcaaucauaguuuugaggagguaguacaaacauuggcuucauuggcuacuguugugcaacaacaaaccaucgcaucagaaucauuagaacaacgcauuacgagucuugagaauggucuaaagccaguuuaugauauggcaaaaacaaucuccucauugaacaggguuugugcugagaugguugcaaaauaugaucuucuggugaugacaaccggucgggcaacagcaaccgcugcggcaacugaggcuuauugggccgaacauggucaaccaccaccuggaccaucacuuuaugaagaaagugcgauucgggguaagauugaaucuagagaugagaccgucccucaaaguguuagggaggcauucaacaaucuaaacaguaccacuucacuaacugaggaaaauuuugggaaaccugacauuucggcaaaggauuugagaaacauuauguaugaucacuugccugguuuuggaacugcuuuccaccaauuaguacaagugauuuguaaauugggaaaagauagcaacucauuggacaucauucaugcugaguuccaggccagccuggcugaaggagacucuccucaaugugcccuaauucaaauuacaaaaagaguuccaaucuuccaagaugcugcuccaccugucauccacauccgcucucgaggugacauuccccgagcuugccagaaaagcuugcguccagucccaccaucgcccaagauugaucgagguuggguauguguuuuucagcuucaagaugguaaaacacuuggacucaaaauu

SEQ ID NO: 49 - DNA, 1023 bp, Artificial Sequence
  Codon optimised DNA encoding Ebola VP35 protein
atgaccaccaggaccaaaggcagaggacacaccgccgccaccacacagaacgacagaatgcctggacctgagctgagcggctggatctctgagcagctgatgacaggcagaatccccgtgtccgacatcttctgcgacatcgagaacaaccccggcctgtgttacgccagccagatgcagcagaccaagcctaatcctaagacacggaacagccagacacagacagaccccatctgcaaccacagcttcgaggaagtggtgcagacactggccagcctggctacagttgtgcagcagcagacaatcgccagcgagagcctggaacagagaatcaccagcctggaaaacggcctgaagcctgtgtacgacatggccaagaccatcagctccctgaacagagtgtgcgccgagatggtggccaaatacgacctgctcgtgatgaccaccggcagagccacagctacagccgctgccacagaagcctattgggccgaacatggacagcctccacctggacctagcctgtacgaggaatctgccatccggggcaagatcgagagcagggatgagacagtgccccagtctgtgcgcgaggccttcaacaacctgaacagcaccacaagcctgaccgaggaaaacttcggcaagcccgacatcagcgccaaggacctgcggaacattatgtacgaccatctgcctggcttcggcaccgccttccatcagctggtgcaagtgatctgcaagctgggcaaagacagcaacagcctggacatcatccacgccgagtttcaggcctctctggccgaaggcgattctcctcagtgtgccctgatccagatcaccaagcgggtgcccatcttccaggatgctgcccctcctgtgatccacatcagaagcagaggcgacatccccagagcctgccagaaatctctcagacccgtgcctccatctcctaagatcgacagaggctgggtctgcgtgttccagctgcaagatggcaagaccctgggcctgaagatctga

SEQ ID NO: 50 - RNA, 1023 nt, Artificial Sequence
  Codon optimised RNA encoding Ebola VP35 protein
augaccaccaggaccaaaggcagaggacacaccgccgccaccacacagaacgacagaaugccuggaccugagcugagcggcuggaucucugagcagcugaugacaggcagaauccccguguccgacaucuucugcgacaucgagaacaaccccggccuguguuacgccagccagaugcagcagaccaagccuaauccuaagacacggaacagccagacacagacagaccccaucugcaaccacagcuucgaggaaguggugcagacacuggccagccuggcuacaguugugcagcagcagacaaucgccagcgagagccuggaacagagaaucaccagccuggaaaacggccugaagccuguguacgacauggccaagaccaucagcucccugaacagagugugcgccgagaugguggccaaauacgaccugcucgugaugaccaccggcagagccacagcuacagccgcugccacagaagccuauugggccgaacauggacagccuccaccuggaccuagccuguacgaggaaucugccauccggggcaagaucgagagcagggaugagacagugccccagucugugcgcgaggccuucaacaaccugaacagcaccacaagccugaccgaggaaaacuucggcaagcccgacaucagcgccaaggaccugcggaacauuauguacgaccaucugccuggcuucggcaccgccuuccaucagcuggugcaagugaucugcaagcugggcaaagacagcaacagccuggacaucauccacgccgaguuucaggccucucuggccgaaggcgauucuccucagugugcccugauccagaucaccaagcgggugcccaucuuccaggaugcugccccuccugugauccacaucagaagcagaggcgacauccccagagccugccagaaaucucucagacccgugccuccaucuccuaagaucgacagaggcugggucugcguguuccagcugcaagauggcaagacccugggccugaagaucuga

SEQ ID NO: 51 - protein, 156 aa, Severe acute respiratory syndrome coronavirus 2
  MISC_FEATURE (23)..(23): X is a stop codon
  MISC_FEATURE (57)..(57): X is a stop codon
  MISC_FEATURE (79)..(79): X is a stop codon
  MISC_FEATURE (119)..(119): X is a stop codon
  MISC_FEATURE (156)..(156): X is a stop codon
MMPTIFFAGILIVTTIVYLTIVXLLQLSLLQVMAQQVLFLNMTTRLVVILKNGNLEXKTVLYYTVTSLQTITSCTQLNXVQTLVLNMLPSSSTIKLLMSLKNMSKFTQSTVHPELLIQXWNQFMMNRRRLLACLCKHKLMSTNLCTHSFRKRQVRX

SEQ ID NO: 52 - protein, 56 aa, Severe acute respiratory syndrome coronavirus 2
MMPTIFFAGILIVTTIVYLTIVQLLQLSLLQVMAQQVLFLNMTTRLVVILKNGNLE

SEQ ID NO: 53 - DNA, 168 bp, Severe acute respiratory syndrome coronavirus 2
atgatgccaactattttctttgctggcatactaattgttacgactattgtataccttacaatagtgcaacttcttcaattgtcattacttcaggtgatggcacaacaagtcctatttctgaacatgactaccagattggtggttatactgaaaaatgggaatctggag

SEQ ID NO: 54 - RNA, 168 nt, Severe acute respiratory syndrome coronavirus 2
augaugccaacuauuuucuuugcuggcauacuaauuguuacgacuauuguauaccuuacaauagugcaacuucuucaauugucauuacuucaggugauggcacaacaaguccuauuucugaacaugacuaccagauuggugguuauacugaaaaaugggaaucuggag

SEQ ID NO: 55 - DNA, 171 bp, Artificial Sequence
  Codon optimised DNA encoding SARS-CoV-2 ORF3b*57 protein
atgatgccgaccatcttcttcgccggcatcctgatcgtgaccaccatcgtgtacctgaccatcgtgcagctgctgcagctcagcctgctgcaagtgatggctcagcaggtcctgttcctgaatatgaccaccagactggtcgtgatcctgaagaacggcaacctggaatga

SEQ ID NO: 56 - RNA, 171 nt, Artificial Sequence
  Codon optimised RNA encoding SARS-CoV-2 ORF3b*57 protein
augaugccgaccaucuucuucgccggcauccugaucgugaccaccaucguguaccugaccaucgugcagcugcugcagcucagccugcugcaagugauggcucagcagguccuguuccugaauaugaccaccagacuggucgugauccugaagaacggcaaccuggaauga

SEQ ID NO: 57 - protein, 78 aa, Severe acute respiratory syndrome coronavirus 2
MMPTIFFAGILIVTTIVYLTIVQLLQLSLLQVMAQQVLFLNMTTRLVVILKNGNLELKTVLYYTVTSLQTITSCTQLN

SEQ ID NO: 58 - DNA, 234 bp, Severe acute respiratory syndrome coronavirus 2
atgatgccaactattttctttgctggcatactaattgttacgactattgtataccttacaatagtgcaacttcttcaattgtcattacttcaggtgatggcacaacaagtcctatttctgaacatgactaccagattggtggttatactgaaaaatgggaatctggagttaaagactgtgttgtattacacagttacttcacttcagactattaccagctgtactcaactcaat

SEQ ID NO: 59 - RNA, 234 nt, Severe acute respiratory syndrome coronavirus 2
augaugccaacuauuuucuuugcuggcauacuaauuguuacgacuauuguauaccuuacaauagugcaacuucuucaauugucauuacuucaggugauggcacaacaaguccuauuucugaacaugacuaccagauuggugguuauacugaaaaaugggaaucuggaguuaaagacuguguuguauuacacaguuacuucacuucagacuauuaccagcuguacucaacucaau

SEQ ID NO: 60 - DNA, 237 bp, Artificial Sequence
  Codon optimised DNA encoding SARS-Cov-2 ORF3b*79 protein
atgatgccgaccatcttcttcgccggcatcctgatcgtgaccaccatcgtgtacctgaccatcgtgcagctgctgcagctcagcctgctgcaagtgatggctcagcaggtcctgttcctgaatatgaccaccagactggtcgtgatcctgaagaacggcaacctggaactgaaaaccgtgctgtactacaccgtgaccagcctgcagaccatcaccagctgcacccagctgaactga

SEQ ID NO: 61 - RNA, 237 nt, Artificial Sequence
  Codon optimised RNA encoding SARS-CoV-2 ORF3b*79 protein
augaugccgaccaucuucuucgccggcauccugaucgugaccaccaucguguaccugaccaucgugcagcugcugcagcucagccugcugcaagugauggcucagcagguccuguuccugaauaugaccaccagacuggucgugauccugaagaacggcaaccuggaacugaaaaccgugcuguacuacaccgugaccagccugcagaccaucaccagcugcacccagcugaacuga

SEQ ID NO: 62 - protein, 56 aa, Severe acute respiratory syndrome coronavirus 2
MMPTIFFAGILIVTTIVYLTIVQMLQLSLLQVMAQQVLFLNMTTRLVVILKNGNLE

SEQ ID NO: 63 - DNA, 171 bp, Severe acute respiratory syndrome coronavirus 2
atgatgccaactattttctttgctggcatactaattgttacgactattgtataccttacaatagtgcaaatgcttcaattgtcattacttcaggtgatggcacaacaagtcctatttctgaacatgactaccagattggtggttatactgaaaaatgggaatctggagtaa

SEQ ID NO: 64 - RNA, 171 nt, Severe acute respiratory syndrome coronavirus 2
augaugccaacuauuuucuuugcuggcauacuaauuguuacgacuauuguauaccuuacaauagugcaaaugcuucaauugucauuacuucaggugauggcacaacaaguccuauuucugaacaugacuaccagauuggugguuauacugaaaaaugggaaucuggaguaa

SEQ ID NO: 65 - DNA, 171 bp, Artificial Sequence
  Codon optimised DNA encoding SARS-CoV-2 ORF3b*57 protein
atgatgccgaccatcttcttcgccggcatcctgatcgtgaccaccatcgtgtacctgaccatcgtgcagatgctgcagctgagcctgctgcaagtgatggcccagcaggtcctgttcctgaatatgaccaccagactggtcgtgatcctgaagaacggcaacctggaatga

SEQ ID NO: 66 - RNA, 171 nt, Artificial Sequence
  Codon optimised RNA encoding SARS-CoV-2 ORF3b*57 protein
augaugccgaccaucuucuucgccggcauccugaucgugaccaccaucguguaccugaccaucgugcagaugcugcagcugagccugcugcaagugauggcccagcagguccuguuccugaauaugaccaccagacuggucgugauccugaagaacggcaaccuggaauga

SEQ ID NO: 67 - DNA, 45 bp, Artificial Sequence
  26S promoter
gggcccctataactctctacggctaacctgaatggactacgacat

SEQ ID NO: 68 - protein, 19 aa, Artificial Sequence
  P2A spacer sequence
ATNFSLLKQAGDVEENPGP

SEQ ID NO: 69 - protein, 20 aa, Artificial Sequence
  T2A spacer sequence
QCTNYALLKLAGDVESNPGP

SEQ ID NO: 70 - protein, 22 aa, Artificial Sequence
  F2A spacer sequence
VKQTLNFDLLKLAGDVESNPGP

SEQ ID NO: 71 - protein, 6 aa, Homo sapiens
  misc_feature (2)..(2): Xaa can be any naturally occurring amino acid
  misc_feature (5)..(5): Xaa can be any naturally occurring amino acid
RXRKXR

SEQ ID NO: 72 - protein, 6 aa, Homo sapiens
RRRRRR

SEQ ID NO: 73 - protein, 27 aa, Artificial Sequence
  Furin/T2A spacer sequence
RRRRRRGSGEGRGSLLTCGDVEENPGP

SEQ ID NO: 74 - DNA, 461 bp, Foot-and-mouth disease virus
agcaggtttccccaactgacacaaaacgtgcaacttgaaactccgcctggtctttccaggtctagaggggtaacactttgtactgcgtttggctccacgctcgatccactggcgagtgttagtaacagcactgttgcttcgtagcggagcatgacggccgtgggaactcctccttggtaacaaggacccacggggccaaaagccacgcccacacgggcccgtcatgtgtgcaaccccagcacggcgactttactgcgaaacccactttaaagtgacattgaaactggtacccacacactggtgacaggctaaggatgcccttcaggtaccccgaggtaacacgcgacactcgggatctgagaaggggactggggcttctataaaagcgctcggtttaaaaagcttctatgcctgaataggtgaccggaggtcggcacctttcctttgcaattactgaccac

SEQ ID NO: 75 - DNA, 551 bp, Encephalomyocarditis virus
cgttactggccgaagccgcttggaataaggccggtgtgcgtttgtctatatgttattttccaccatattgccgtcttttggcaatgtgagggcccggaaacctggccctgtcttcttgacgagcattcctaggggtctttcccctctcgccaaaggaatgcaaggtctgttgaatgtcgtgaaggaagcagttcctctggaagcttcttgaagacaaacaacgtctgtagcgaccctttgcaggcagcggaaccccccacctggcgacaggtgcctctgcggccaaaagccacgtgtataagatacacctgcaaaggcggcacaaccccagtgccacgttgtgagttggatagttgtggaaagagtcaaatggctcccctcaagcgtattcaacaaggggctgaaggatgcccagaaggtaccccattgtatgggatctgatctggggcctcggtgcacatgcttttcatgtgtttagtcgaggttaaaaaacgtctaggccccccgaaccacggggacgtggttttcctttgaaaaacacgatgataata

SEQ ID NO: 76 - DNA, 45 bp, Artificial Sequence
  Flexible linker sequence
ggaggtggcgggtccgggggcgggggtagcggtggcgggggctcc

SEQ ID NO: 77 - protein, 15 aa, Artificial Sequence
  Flexible linker sequence
GGGGSGGGGSGGGGS

SEQ ID NO: 78 - protein, 535 aa, Unknown
  Non-structural protein 1
MEKVHVDIEEDSPFLRALQRSFPQFEVEAKQVTDNDHANARAFSHLASKLIETEVDPSDTILDIGSAPARRMYSKHKYHCICPMRCAEDPDRLYKYATKLKKNCKEITDKELDKKMKELAAVMSDPDLETETMCLHDDESCRYEGQVAVYQDVYAVDGPTSLYHQANKGVRVAYWIGFDTTPFMFKNLAGAYPSYSTNWADETVLTARNIGLCSSDVMERSRRGMSILRKKYLKPSNNVLFSVGSTIYHEKRDLLRSWHLPSVFHLRGKQNYTCRCETIVSCDGYVVKRIAISPGLYGKPSGYAATMHREGFLCCKVTDTLNGERVSFPVCTYVPATLCDQMTGILATDVSADDAQKLLVGLNQRIVVNGRTQRNTNTMKNYLLPVVAQAFARWAKEYKEDQEDERPLGLRDRQLVMGCCWAFRRHKITSIYKRPDTQTIIKVNSDFHSFVLPRIGSNTLEIGLRTRIRKMLEEHKEPSPLITAEDVQEAKCAADEAKEVREAEELRAALPPLAADVEEPTLEADVDLMLQEAGA

SEQ ID NO: 79 - DNA, 1605 bp, Unknown
  Non-structural protein 1
atggagaaagttcacgttgacatcgaggaagacagcccattcctcagagctttgcagcggagcttcccgcagtttgaggtagaagccaagcaggtcactgataatgaccatgctaatgccagagcgttttcgcatctggcttcaaaactgatcgaaacggaggtggacccatccgacacgatccttgacattggaagtgcgcccgcccgcagaatgtattctaagcacaagtatcattgtatctgtccgatgagatgtgcggaagatccggacagattgtataagtatgcaactaagctgaagaaaaactgtaaggaaataactgataaggaattggacaagaaaatgaaggagctggccgccgtcatgagcgaccctgacctggaaactgagactatgtgcctccacgacgacgagtcgtgtcgctacgaagggcaagtcgctgtttaccaggatgtatacgcggttgacggaccgacaagtctctatcaccaagccaataagggagttagagtcgcctactggataggctttgacaccaccccttttatgtttaagaacttggctggagcatatccatcatactctaccaactgggccgacgaaaccgtgttaacggctcgtaacataggcctatgcagctctgacgttatggagcggtcacgtagagggatgtccattcttagaaagaagtatttgaaaccatccaacaatgttctattctctgttggctcgaccatctaccacgagaagagggacttactgaggagctggcacctgccgtctgtatttcacttacgtggcaagcaaaattacacatgtcggtgtgagactatagttagttgcgacgggtacgtcgttaaaagaatagctatcagtccaggcctgtatgggaagccttcaggctatgctgctacgatgcaccgcgagggattcttgtgctgcaaagtgacagacacattgaacggggagagggtctcttttcccgtgtgcacgtatgtgccagctacattgtgtgaccaaatgactggcatactggcaacagatgtcagtgcggacgacgcgcaaaaactgctggttgggctcaaccagcgtatagtcgtcaacggtcgcacccagagaaacaccaataccatgaaaaattaccttttgcccgtagtggcccaggcatttgctaggtgggcaaaggaatataaggaagatcaagaagatgaaaggccactaggactacgagatagacagttagtcatggggtgttgttgggcttttagaaggcacaagataacatctatttataagcgcccggatacccaaaccatcatcaaagtgaacagcgatttccactcattcgtgctgcccaggataggcagtaacacattggagatcgggctgagaacaagaatcaggaaaatgttagaggagcacaaggagccgtcacctctcattaccgccgaggacgtacaagaagctaagtgcgcagccgatgaggctaaggaggtgcgtgaagccgaggagttgcgcgcagctctaccacctttggcagctgatgttgaggagcccactctggaagccgatgtcgacttgatgttacaagaggctggggcc

SEQ ID NO: 80 - RNA, 1605 nt, Unknown
  Non-structural protein 1
auggagaaaguucacguugacaucgaggaagacagcccauuccucagagcuuugcagcggagcuucccgcaguuugagguagaagccaagcaggucacugauaaugaccaugcuaaugccagagcguuuucgcaucuggcuucaaaacugaucgaaacggagguggacccauccgacacgauccuugacauuggaagugcgcccgcccgcagaauguauucuaagcacaaguaucauuguaucuguccgaugagaugugcggaagauccggacagauuguauaaguaugcaacuaagcugaagaaaaacuguaaggaaauaacugauaaggaauuggacaagaaaaugaaggagcuggccgccgucaugagcgacccugaccuggaaacugagacuaugugccuccacgacgacgagucgugucgcuacgaagggcaagucgcuguuuaccaggauguauacgcgguugacggaccgacaagucucuaucaccaagccaauaagggaguuagagucgccuacuggauaggcuuugacaccaccccuuuuauguuuaagaacuuggcuggagcauauccaucauacucuaccaacugggccgacgaaaccguguuaacggcucguaacauaggccuaugcagcucugacguuauggagcggucacguagagggauguccauucuuagaaagaaguauuugaaaccauccaacaauguucuauucucuguuggcucgaccaucuaccacgagaagagggacuuacugaggagcuggcaccugccgucuguauuucacuuacguggcaagcaaaauuacacaugucggugugagacuauaguuaguugcgacggguacgucguuaaaagaauagcuaucaguccaggccuguaugggaagccuucaggcuaugcugcuacgaugcaccgcgagggauucuugugcugcaaagugacagacacauugaacggggagagggucucuuuucccgugugcacguaugugccagcuacauugugugaccaaaugacuggcauacuggcaacagaugucagugcggacgacgcgcaaaaacugcugguugggcucaaccagcguauagucgucaacggucgcacccagagaaacaccaauaccaugaaaaauuaccuuuugcccguaguggcccaggcauuugcuaggugggcaaaggaauauaaggaagaucaagaagaugaaaggccacuaggacuacgagauagacaguuagucaugggguguuguugggcuuuuagaaggcacaagauaacaucuauuuauaagcgcccggauacccaaaccaucaucaaagugaacagcgauuuccacucauucgugcugcccaggauaggcaguaacacauuggagaucgggcugagaacaagaaucaggaaaauguuagaggagcacaaggagccgucaccucucauuaccgccgaggacguacaagaagcuaagugcgcagccgaugaggcuaaggaggugcgugaagccgaggaguugcgcgcagcucuaccaccuuuggcagcugauguugaggagcccacucuggaagccgaugucgacuugauguuacaagaggcuggggcc

SEQ ID NO: 81 - protein, 794 aa, Unknown
  Non-structural protein 2
GSVETPRGLIKVTSYDGEDKIGSYAVLSPQAVLKSEKLSCIHPLAEQVIVITHSGRKGRYAVEPYHGKVVVPEGHAIPVQDFQALSESATIVYNEREFVNRYLHHIATHGGALNTDEEYYKTVKPSEHDGEYLYDIDRKQCVKKELVTGLGLTGELVDPPFHEFAYESLRTRPAAPYQVPTIGVYGVPGSGKSGIIKSAVTKKDLVVSAKKENCAEIIRDVKKMKGLDVNARTVDSVLLNGCKHPVETLYIDEAFACHAGTLRALIAIIRPKKAVLCGDPKQCGFFNMMCLKVHFNHEICTQVFHKSISRRCTKSVTSVVSTLFYDKKMRTTNPKETKIVIDTTGSTKPKQDDLILTCFRGWVKQLQIDYKGNEIMTAAASQGLTRKGVYAVRYKVNENPLYAPTSEHVNVLLTRTEDRIVWKTLAGDPWIKTLTAKYPGNFTATIEEWQAEHDAIMRHILERPDPTDVFQNKANVCWAKALVPVLKTAGIDMTTEQWNTVDYFETDKAHSAEIVLNQLCVRFFGLDLDSGLFSAPTVPLSIRNNHWDNSPSPNMYGLNKEVVRQLSRRYPQLPRAVATGRVYDMNTGTLRNYDPRINLVPVNRRLPHALVLHHNEHPQSDFSSFVSKLKGRTVLVVGEKLSVPGKMVDWLSDRPEATFRARLDLGIPGDVPKYDIIFVNVRTPYKYHHYQQCEDHAIKLSMLTKKACLHLNPGGTCVSIGYGYADRASESIIGAIARQFKFSRVCKPKSSLEETEVLFVFIGYDRKARTHNSYKLSSTLTNIYTGSRLHEAGC

SEQ ID NO: 82 - DNA, 2382 bp, Unknown
  Non-structural protein 2
ggctcagtggagacacctcgtggcttgataaaggttaccagctacgatggcgaggacaagatcggctcttacgctgtgctttctccgcaggctgtactcaagagtgaaaaattatcttgcatccaccctctcgctgaacaagtcatagtgataacacactctggccgaaaagggcgttatgccgtggaaccataccatggtaaagtagtggtgccagagggacatgcaatacccgtccaggactttcaagctctgagtgaaagtgccaccattgtgtacaacgaacgtgagttcgtaaacaggtacctgcaccatattgccacacatggaggagcgctgaacactgatgaagaatattacaaaactgtcaagcccagcgagcacgacggcgaatacctgtacgacatcgacaggaaacagtgcgtcaagaaagaactagtcactgggctagggctcacaggcgagctggtggatcctcccttccatgaattcgcctacgagagtctgagaacacgaccagccgctccttaccaagtaccaaccataggggtgtatggcgtgccaggatcaggcaagtctggcatcattaaaagcgcagtcaccaaaaaagatctagtggtgagcgccaagaaagaaaactgtgcagaaattataagggacgtcaagaaaatgaaagggctggacgtcaatgccagaactgtggactcagtgctcttgaatggatgcaaacaccccgtagagaccctgtatattgacgaagcttttgcttgtcatgcaggtactctcagagcgctcatagccattataagacctaaaaaggcagtgctctgcggggatcccaaacagtgcggtttttttaacatgatgtgcctgaaagtgcattttaaccacgagatttgcacacaagtcttccacaaaagcatctctcgccgttgcactaaatctgtgacttcggtcgtctcaaccttgttttacgacaaaaaaatgagaacgacgaatccgaaagagactaagattgtgattgacactaccggcagtaccaaacctaagcaggacgatctcattctcacttgtttcagagggtgggtgaagcagttgcaaatagattacaaaggcaacgaaataatgacggcagctgcctctcaagggctgacccgtaaaggtgtgtatgccgttcggtacaaggtgaatgaaaatcctctgtacgcacccacctcagaacatgtgaacgtcctactgacccgcacggaggaccgcatcgtgtggaaaacactagccggcgacccatggataaaaacactgactgccaagtaccctgggaatttcactgccacgatagaggagtggcaagcagagcatgatgccatcatgaggcacatcttggagagaccggaccctaccgacgtcttccagaataaggcaaacgtgtgttgggccaaggctttagtgccggtgctgaagaccgctggcatagacatgaccactgaacaatggaacactgtggattattttgaaacggacaaagctcactcagcagagatagtattgaaccaactatgcgtgaggttctttggactcgatctggactccggtctattttctgcacccactgttccgttatccattaggaataatcactgggataactccccgtcgcctaacatgtacgggctgaataaagaagtggtccgtcagctctctcgcaggtacccacaactgcctcgggcagttgccactggaagagtctatgacatgaacactggtacactgcgcaattatgatccgcgcataaacctagtacctgtaaacagaagactgcctcatgctttagtcctccaccataatgaacacccacagagtgacttttcttcattcgtcagcaaattgaagggcagaactgtcctggtggtcggggaaaagttgtccgtcccaggcaaaatggttgactggttgtcagaccggcctgaggctaccttcagagctcggctggatttaggcatcccaggtgatgtgcccaaatatgacataatatttgttaatgtgaggaccccatataaataccatcactatcagcagtgtgaagaccatgccattaagcttagcatgttgaccaagaaagcttgtctgcatctgaatcccggcggaacctgtgtcagcataggttatggttacgctgacagggccagcgaaagcatcattggtgctatagcgcggcagttcaagttttcccgggtatgcaaaccgaaatcctcacttgaagagacggaagttctgtttgtattcattgggtacgatcgcaaggcccgtacgcacaattcttacaagctttcatcaaccttgaccaacatttatacaggttccagactccacgaagccggatgt

SEQ ID NO: 83 - RNA, 2382 nt, Unknown
  Non-structural protein 2
ggcucaguggagacaccucguggcuugauaaagguuaccagcuacgauggcgaggacaagaucggcucuuacgcugugcuuucuccgcaggcuguacucaagagugaaaaauuaucuugcauccacccucucgcugaacaagucauagugauaacacacucuggccgaaaagggcguuaugccguggaaccauaccaugguaaaguaguggugccagagggacaugcaauacccguccaggacuuucaagcucugagugaaagugccaccauuguguacaacgaacgugaguucguaaacagguaccugcaccauauugccacacauggaggagcgcugaacacugaugaagaauauuacaaaacugucaagcccagcgagcacgacggcgaauaccuguacgacaucgacaggaaacagugcgucaagaaagaacuagucacugggcuagggcucacaggcgagcugguggauccucccuuccaugaauucgccuacgagagucugagaacacgaccagccgcuccuuaccaaguaccaaccauagggguguauggcgugccaggaucaggcaagucuggcaucauuaaaagcgcagucaccaaaaaagaucuaguggugagcgccaagaaagaaaacugugcagaaauuauaagggacgucaagaaaaugaaagggcuggacgucaaugccagaacuguggacucagugcucuugaauggaugcaaacaccccguagagacccuguauauugacgaagcuuuugcuugucaugcagguacucucagagcgcucauagccauuauaagaccuaaaaaggcagugcucugcggggaucccaaacagugcgguuuuuuuaacaugaugugccugaaagugcauuuuaaccacgagauuugcacacaagucuuccacaaaagcaucucucgccguugcacuaaaucugugacuucggucgucucaaccuuguuuuacgacaaaaaaaugagaacgacgaauccgaaagagacuaagauugugauugacacuaccggcaguaccaaaccuaagcaggacgaucucauucucacuuguuucagagggugggugaagcaguugcaaauagauuacaaaggcaacgaaauaaugacggcagcugccucucaagggcugacccguaaagguguguaugccguucgguacaaggugaaugaaaauccucuguacgcacccaccucagaacaugugaacguccuacugacccgcacggaggaccgcaucguguggaaaacacuagccggcgacccauggauaaaaacacugacugccaaguacccugggaauuucacugccacgauagaggaguggcaagcagagcaugaugccaucaugaggcacaucuuggagagaccggacccuaccgacgucuuccagaauaaggcaaacguguguugggccaaggcuuuagugccggugcugaagaccgcuggcauagacaugaccacugaacaauggaacacuguggauuauuuugaaacggacaaagcucacucagcagagauaguauugaaccaacuaugcgugagguucuuuggacucgaucuggacuccggucuauuuucugcacccacuguuccguuauccauuaggaauaaucacugggauaacuccccgucgccuaacauguacgggcugaauaaagaagugguccgucagcucucucgcagguacccacaacugccucgggcaguugccacuggaagagucuaugacaugaacacugguacacugcgcaauuaugauccgcgcauaaaccuaguaccuguaaacagaagacugccucaugcuuuaguccuccaccauaaugaacacccacagagugacuuuucuucauucgucagcaaauugaagggcagaacuguccugguggucggggaaaaguuguccgucccaggcaaaaugguugacugguugucagaccggccugaggcuaccuucagagcucggcuggauuuaggcaucccaggugaugugcccaaauaugacauaauauuuguuaaugugaggaccccauauaaauaccaucacuaucagcagugugaagaccaugccauuaagcuuagcauguugaccaagaaagcuugucugcaucugaaucccggcggaaccugugucagcauagguuaugguuacgcugacagggccagcgaaagcaucauuggugcuauagcgcggcaguucaaguuuucccggguaugcaaaccgaaauccucacuugaagagacggaaguucuguuuguauucauuggguacgaucgcaaggcccguacgcacaauucuuacaagcuuucaucaaccuugaccaacauuuauacagguuccagacuccacgaagccggaugu

SEQ ID NO: 84 - protein, 556 aa, Unknown
  Non-structural protein 3
APSYHVVRGDIATATEGVIINAANSKGQPGGGVCGALYKKFPESFDLQPIEVGKARLVKGAAKHIIHAVGPNFNKVSEVEGDKQLAEAYESIAKIVNDNNYKSVAIPLLSTGIFSGNKDRLTQSLNHLLTALDTTDADVAIYCRDKKWEMTLKEAVARREAVEEICISDDSSVTEPDAELVRVHPKSSLAGRKGYSTSDGKTFSYLEGTKFHQAAKDIAEINAMWPVATEANEQVCMYILGESMSSIRSKCPVEESEASTPPSTLPCLCIHAMTPERVQRLKASRPEQITVCSSFPLPKYRITGVQKIQCSQPILFSPKVPAYIHPRKYLVETPPVDETPEPSAENQSTEGTPEQPPLITEDETRTRTPEPIIIEEEEEDSISLLSDGPTHQVLQVEADIHGPPSVSSSSWSIPHASDFDVDSLSILDTLEGASVTSGATSAETNSYFAKSMEFLARPVPAPRTVFRNPPHPAPRTRTPSLAPSRACSRTSLVSTPPGVNRVITREELEALTPSRTPSRSVSRTSLVSNPPGVNRVITREEFEAFVAQQQRFDAGA

SEQ ID NO: 85 - DNA, 1671 bp, Unknown
  Non-structural protein 3
gcaccctcatatcatgtggtgcgaggggatattgccacggccaccgaaggagtgattataaatgctgctaacagcaaaggacaacctggcggaggggtgtgcggagcgctgtataagaaattcccggaaagcttcgatttacagccgatcgaagtaggaaaagcgcgactggtcaaaggtgcagctaaacatatcattcatgccgtaggaccaaacttcaacaaagtttcggaggttgaaggtgacaaacagttggcagaggcttatgagtccatcgctaagattgtcaacgataacaattacaagtcagtagcgattccactgttgtccaccggcatcttttccgggaacaaagatcgactaacccaatcattgaaccatttgctgacagctttagacaccactgatgcagatgtagccatatactgcagggacaagaaatgggaaatgactctcaaggaagcagtggctaggagagaagcagtggaggagatatgcatatccgacgactcttcagtgacagaacctgatgcagagctggtgagggtgcatccgaagagttctttggctggaaggaagggctacagcacaagcgatggcaaaactttctcatatttggaagggaccaagtttcaccaggcggccaaggatatagcagaaattaatgccatgtggcccgttgcaacggaggccaatgagcaggtatgcatgtatatcctcggagaaagcatgagcagtattaggtcgaaatgccccgtcgaagagtcggaagcctccacaccacctagcacgctgccttgcttgtgcatccatgccatgactccagaaagagtacagcgcctaaaagcctcacgtccagaacaaattactgtgtgctcatcctttccattgccgaagtatagaatcactggtgtgcagaagatccaatgctcccagcctatattgttctcaccgaaagtgcctgcgtatattcatccaaggaagtatctcgtggaaacaccaccggtagacgagactccggagccatcggcagagaaccaatccacagaggggacacctgaacaaccaccacttataaccgaggatgagaccaggactagaacgcctgagccgatcatcatcgaagaggaagaagaggatagcataagtttgctgtcagatggcccgacccaccaggtgctgcaagtcgaggcagacattcacgggccgccctctgtatctagctcatcctggtccattcctcatgcatccgactttgatgtggacagtttatccatacttgacaccctggagggagctagcgtgaccagcggggcaacgtcagccgagactaactcttacttcgcaaagagtatggagtttctggcgcgaccggtgcctgcgcctcgaacagtattcaggaaccctccacatcccgctccgcgcacaagaacaccgtcacttgcacccagcagggcctgctcgagaaccagcctagtttccaccccgccaggcgtgaatagggtgatcactagagaggagctcgaggcgcttaccccgtcacgcactcctagcaggtcggtctcgagaaccagcctggtctccaacccgccaggcgtaaatagggtgattacaagagaggagtttgaggcgttcgtagcacaacaacaatgacggtttgatgcgggtgca

SEQ ID NO: 86 - RNA, 1671 nt, Unknown
  Non-structural protein 3
gcacccucauaucauguggugcgaggggauauugccacggccaccgaaggagugauuauaaaugcugcuaacagcaaaggacaaccuggcggaggggugugcggagcgcuguauaagaaauucccggaaagcuucgauuuacagccgaucgaaguaggaaaagcgcgacuggucaaaggugcagcuaaacauaucauucaugccguaggaccaaacuucaacaaaguuucggagguugaaggugacaaacaguuggcagaggcuuaugaguccaucgcuaagauugucaacgauaacaauuacaagucaguagcgauuccacuguuguccaccggcaucuuuuccgggaacaaagaucgacuaacccaaucauugaaccauuugcugacagcuuuagacaccacugaugcagauguagccauauacugcagggacaagaaaugggaaaugacucucaaggaagcaguggcuaggagagaagcaguggaggagauaugcauauccgacgacucuucagugacagaaccugaugcagagcuggugagggugcauccgaagaguucuuuggcuggaaggaagggcuacagcacaagcgauggcaaaacuuucucauauuuggaagggaccaaguuucaccaggcggccaaggauauagcagaaauuaaugccauguggcccguugcaacggaggccaaugagcagguaugcauguauauccucggagaaagcaugagcaguauuaggucgaaaugccccgucgaagagucggaagccuccacaccaccuagcacgcugccuugcuugugcauccaugccaugacuccagaaagaguacagcgccuaaaagccucacguccagaacaaauuacugugugcucauccuuuccauugccgaaguauagaaucacuggugugcagaagauccaaugcucccagccuauauuguucucaccgaaagugccugcguauauucauccaaggaaguaucucguggaaacaccaccgguagacgagacuccggagccaucggcagagaaccaauccacagaggggacaccugaacaaccaccacuuauaaccgaggaugagaccaggacuagaacgccugagccgaucaucaucgaagaggaagaagaggauagcauaaguuugcugucagauggcccgacccaccaggugcugcaagucgaggcagacauucacgggccgcccucuguaucuagcucauccugguccauuccucaugcauccgacuuugauguggacaguuuauccauacuugacacccuggagggagcuagcgugaccagcggggcaacgucagccgagacuaacucuuacuucgcaaagaguauggaguuucuggcgcgaccggugccugcgccucgaacaguauucaggaacccuccacaucccgcuccgcgcacaagaacaccgucacuugcacccagcagggccugcucgagaaccagccuaguuuccaccccgccaggcgugaauagggugaucacuagagaggagcucgaggcgcuuaccccgucacgcacuccuagcaggucggucucgagaaccagccuggucuccaacccgccaggcguaaauagggugauuacaagagaggaguuugaggcguucguagcacaacaacaaugacgguuugaugcgggugca

SEQ ID NO: 87 - protein, 607 aa, Unknown
  Non-structural protein 4
YIFSSDTGQGHLQQKSVRQTVLSEVVLERTELEISYAPRLDQEKEELLRKKLQLNPTPANRSRYQSRKVENMKAITARRILQGLGHYLKAEGKVECYRTLHPVPLYSSSVNRAFSSPKVAVEACNAMLKENFPTVASYCIIPEYDAYLDMVDGASCCLDTASFCPAKLRSFPKKHSYLEPTIRSAVPSAIQNTLQNVLAAATKRNCNVTQMRELPVLDSAAFNVECFKKYACNNEYWETFKENPIRLTEENVVNYITKLKGPKAAALFAKTHNLNMLQDIPMDRFVMDLKRDVKVTPGTKHTEERPKVQVIQAADPLATAYLCGIHRELVRRLNAVLLPNIHTLFDMSAEDFDAIIAEHFQPGDCVLETDIASFDKSEDDAMALTALMILEDLGVDAELLTLIEAAFGEISSIHLPTKTKFKFGAMMKSGMFLTLFVNTVINIVIASRVLRERLTGSPCAAFIGDDNIVKGVKSDKLMADRCATWLNMEVKIIDAVVGEKAPYFCGGFILCDSVTGTACRVADPLKRLFKLGKPLAADDEHDDDRRRALHEESTRWNRVGILSELCKAVESRYETVGTSIIVMAMTTLASSVKSFSYLRGAPITLYG

SEQ ID NO: 88 - DNA, 1821 bp, Unknown
  Non-structural protein 4
tacatcttttcctccgacaccggtcaagggcatttacaacaaaaatcagtaaggcaaacggtgctatccgaagtggtgttggagaggaccgaattggagatttcgtatgccccgcgcctcgaccaagaaaaagaagaattactacgcaagaaattacagttaaatcccacacctgctaacagaagcagataccagtccaggaaggtggagaacatgaaagccataacagctagacgtattctgcaaggcctagggcattatttgaaggcagaaggaaaagtggagtgctaccgaaccctgcatcctgttcctttgtattcatctagtgtgaaccgtgccttttcaagccccaaggtcgcagtggaagcctgtaacgccatgttgaaagagaactttccgactgtggcttcttactgtattattccagagtacgatgcctatttggacatggttgacggagcttcatgctgcttagacactgccagtttttgccctgcaaagctgcgcagctttccaaagaaacactcctatttggaacccacaatacgatcggcagtgccttcagcgatccagaacacgctccagaacgtcctggcagctgccacaaaaagaaattgcaatgtcacgcaaatgagagaattgcccgtattggattcggcggcctttaatgtggaatgcttcaagaaatatgcgtgtaataatgaatattgggaaacgtttaaagaaaaccccatcaggcttactgaagaaaacgtggtaaattacattaccaaattaaaaggaccaaaagctgctgctctttttgcgaagacacataatttgaatatgttgcaggacataccaatggacaggtttgtaatggacttaaagagagacgtgaaagtgactccaggaacaaaacatactgaagaacggcccaaggtacaggtgatccaggctgccgatccgctagcaacagcgtatctgtgcggaatccaccgagagctggttaggagattaaatgcggtcctgcttccgaacattcatacactgtttgatatgtcggctgaagactttgacgctattatagccgagcacttccagcctggggattgtgttctggaaactgacatcgcgtcgtttgataaaagtgaggacgacgccatggctctgaccgcgttaatgattctggaagacttaggtgtggacgcagagctgttgacgctgattgaggcggctttcggcgaaatttcatcaatacatttgcccactaaaactaaatttaaattcggagccatgatgaaatctggaatgttcctcacactgtttgtgaacacagtcattaacattgtaatcgcaagcagagtgttgagagaacggctaaccggatcaccatgtgcagcattcattggagatgacaatatcgtgaaaggagtcaaatcggacaaattaatggcagacaggtgcgccacctggttgaatatggaagtcaagattatagatgctgtggtgggcgagaaagcgccttatttctgtggagggtttattttgtgtgactccgtgaccggcacagcgtgccgtgtggcagaccccctaaaaaggctgtttaagcttggcaaacctctggcagcagacgatgaacatgatgatgacaggagaagggcattgcatgaagagtcaacacgctggaaccgagtgggtattctttcagagctgtgcaaggcagtagaatcaaggtatgaaaccgtaggaacttccatcatagttatggccatgactactctagctagcagtgttaaatcattcagctacctgagaggggcccctataactctctacggc

SEQ ID NO: 89 - RNA, 1821 nt, Unknown
  Non-structural protein 4
uacaucuuuuccuccgacaccggucaagggcauuuacaacaaaaaucaguaaggcaaacggugcuauccgaagugguguuggagaggaccgaauuggagauuucguaugccccgcgccucgaccaagaaaaagaagaauuacuacgcaagaaauuacaguuaaaucccacaccugcuaacagaagcagauaccaguccaggaagguggagaacaugaaagccauaacagcuagacguauucugcaaggccuagggcauuauuugaaggcagaaggaaaaguggagugcuaccgaacccugcauccuguuccuuuguauucaucuagugugaaccgugccuuuucaagccccaaggucgcaguggaagccuguaacgccauguugaaagagaacuuuccgacuguggcuucuuacuguauuauuccagaguacgaugccuauuuggacaugguugacggagcuucaugcugcuuagacacugccaguuuuugcccugcaaagcugcgcagcuuuccaaagaaacacuccuauuuggaacccacaauacgaucggcagugccuucagcgauccagaacacgcuccagaacguccuggcagcugccacaaaaagaaauugcaaugucacgcaaaugagagaauugcccguauuggauucggcggccuuuaauguggaaugcuucaagaaauaugcguguaauaaugaauauugggaaacguuuaaagaaaaccccaucaggcuuacugaagaaaacgugguaaauuacauuaccaaauuaaaaggaccaaaagcugcugcucuuuuugcgaagacacauaauuugaauauguugcaggacauaccaauggacagguuuguaauggacuuaaagagagacgugaaagugacuccaggaacaaaacauacugaagaacggcccaagguacaggugauccaggcugccgauccgcuagcaacagcguaucugugcggaauccaccgagagcugguuaggagauuaaaugcgguccugcuuccgaacauucauacacuguuugauaugucggcugaagacuuugacgcuauuauagccgagcacuuccagccuggggauuguguucuggaaacugacaucgcgucguuugauaaaagugaggacgacgccauggcucugaccgcguuaaugauucuggaagacuuagguguggacgcagagcuguugacgcugauugaggcggcuuucggcgaaauuucaucaauacauuugcccacuaaaacuaaauuuaaauucggagccaugaugaaaucuggaauguuccucacacuguuugugaacacagucauuaacauuguaaucgcaagcagaguguugagagaacggcuaaccggaucaccaugugcagcauucauuggagaugacaauaucgugaaaggagucaaaucggacaaauuaauggcagacaggugcgccaccugguugaauauggaagucaagauuauagaugcuguggugggcgagaaagcgccuuauuucuguggaggguuuauuuugugugacuccgugaccggcacagcgugccguguggcagacccccuaaaaaggcuguuuaagcuuggcaaaccucuggcagcagacgaugaacaugaugaugacaggagaagggcauugcaugaagagucaacacgcuggaaccgaguggguauucuuucagagcugugcaaggcaguagaaucaagguaugaaaccguaggaacuuccaucauaguuauggccaugacuacucuagcuagcaguguuaaaucauucagcuaccugagaggggccccuauaacucucuacggc

SEQ ID NO: 90 - RNA, 44 nt, Artificial Sequence
  5'UTR
augggcggcgcaugagagaagcccagaccaauuaccuacccaaa

SEQ ID NO: 91 - RNA, 142 nt, Artificial Sequence
  3'UTR
aauuggcaagcugcuuacauagaacucgcggcgauuggcaugccgccuuaaaauuuuuauuuuauuuuucuuuucuuuuccgaaucggauuuuguuuuuaauauuucaaaaaaaaaaaaaaaaaaaaaaaaaaaaaaaaaaa

SEQ ID NO: 92 - RNA, 7578 nt, Artificial Sequence
  RNA construct
augggcggcgcaugagagaagcccagaccaauuaccuacccaaaauggagaaaguucacguugacaucgaggaagacagcccauuccucagagcuuugcagcggagcuucccgcaguuugagguagaagccaagcaggucacugauaaugaccaugcuaaugccagagcguuuucgcaucuggcuucaaaacugaucgaaacggagguggacccauccgacacgauccuugacauuggaagugcgcccgcccgcagaauguauucuaagcacaaguaucauuguaucuguccgaugagaugugcggaagauccggacagauuguauaaguaugcaacuaagcugaagaaaaacuguaaggaaauaacugauaaggaauuggacaagaaaaugaaggagcuggccgccgucaugagcgacccugaccuggaaacugagacuaugugccuccacgacgacgagucgugucgcuacgaagggcaagucgcuguuuaccaggauguauacgcgguugacggaccgacaagucucuaucaccaagccaauaagggaguuagagucgccuacuggauaggcuuugacaccaccccuuuuauguuuaagaacuuggcuggagcauauccaucauacucuaccaacugggccgacgaaaccguguuaacggcucguaacauaggccuaugcagcucugacguuauggagcggucacguagagggauguccauucuuagaaagaaguauuugaaaccauccaacaauguucuauucucuguuggcucgaccaucuaccacgagaagagggacuuacugaggagcuggcaccugccgucuguauuucacuuacguggcaagcaaaauuacacaugucggugugagacuauaguuaguugcgacggguacgucguuaaaagaauagcuaucaguccaggccuguaugggaagccuucaggcuaugcugcuacgaugcaccgcgagggauucuugugcugcaaagugacagacacauugaacggggagagggucucuuuucccgugugcacguaugugccagcuacauugugugaccaaaugacuggcauacuggcaacagaugucagugcggacgacgcgcaaaaacugcugguugggcucaaccagcguauagucgucaacggucgcacccagagaaacaccaauaccaugaaaaauuaccuuuugcccguaguggcccaggcauuugcuaggugggcaaaggaauauaaggaagaucaagaagaugaaaggccacuaggacuacgagauagacaguuagucaugggguguuguugggcuuuuagaaggcacaagauaacaucuauuuauaagcgcccggauacccaaaccaucaucaaagugaacagcgauuuccacucauucgugcugcccaggauaggcaguaacacauuggagaucgggcugagaacaagaaucaggaaaauguuagaggagcacaaggagccgucaccucucauuaccgccgaggacguacaagaagcuaagugcgcagccgaugaggcuaaggaggugcgugaagccgaggaguugcgcgcagcucuaccaccuuuggcagcugauguugaggagcccacucuggaagccgaugucgacuugauguuacaagaggcuggggccggcucaguggagacaccucguggcuugauaaagguuaccagcuacgauggcgaggacaagaucggcucuuacgcugugcuuucuccgcaggcuguacucaagagugaaaaauuaucuugcauccacccucucgcugaacaagucauagugauaacacacucuggccgaaaagggcguuaugccguggaaccauaccaugguaaaguaguggugccagagggacaugcaauacccguccaggacuuucaagcucugagugaaagugccaccauuguguacaacgaacgugaguucguaaacagguaccugcaccauauugccacacauggaggagcgcugaacacugaugaagaauauuacaaaacugucaagcccagcgagcacgacggcgaauaccuguacgacaucgacaggaaacagugcgucaagaaagaacuagucacugggcuagggcucacaggcgagcugguggauccucccuuccaugaauucgccuacgagagucugagaacacgaccagccgcuccuuaccaaguaccaaccauagggguguauggcgugccaggaucaggcaagucuggcaucauuaaaagcgcagucaccaaaaaagaucuaguggugagcgccaagaaagaaaacugugcagaaauuauaagggacgucaagaaaaugaaagggcuggacgucaaugccagaacuguggacucagugcucuugaauggaugcaaacaccccguagagacccuguauauugacgaagcuuuugcuugucaugcagguacucucagagcgcucauagccauuauaagaccuaaaaaggcagugcucugcggggaucccaaacagugcgguuuuuuuaacaugaugugccugaaagugcauuuuaaccacgagauuugcacacaagucuuccacaaaagcaucucucgccguugcacuaaaucugugacuucggucgucucaaccuuguuuuacgacaaaaaaaugagaacgacgaauccgaaagagacuaagauugugauugacacuaccggcaguaccaaaccuaagcaggacgaucucauucucacuuguuucagagggugggugaagcaguugcaaauagauuacaaaggcaacgaaauaaugacggcagcugccucucaagggcugacccguaaagguguguaugccguucgguacaaggugaaugaaaauccucuguacgcacccaccucagaacaugugaacguccuacugacccgcacggaggaccgcaucguguggaaaacacuagccggcgacccauggauaaaaacacugacugccaaguacccugggaauuucacugccacgauagaggaguggcaagcagagcaugaugccaucaugaggcacaucuuggagagaccggacccuaccgacgucuuccagaauaaggcaaacguguguugggccaaggcuuuagugccggugcugaagaccgcuggcauagacaugaccacugaacaauggaacacuguggauuauuuugaaacggacaaagcucacucagcagagauaguauugaaccaacuaugcgugagguucuuuggacucgaucuggacuccggucuauuuucugcacccacuguuccguuauccauuaggaauaaucacugggauaacuccccgucgccuaacauguacgggcugaauaaagaagugguccgucagcucucucgcagguacccacaacugccucgggcaguugccacuggaagagucuaugacaugaacacugguacacugcgcaauuaugauccgcgcauaaaccuaguaccuguaaacagaagacugccucaugcuuuaguccuccaccauaaugaacacccacagagugacuuuucuucauucgucagcaaauugaagggcagaacuguccugguggucggggaaaaguuguccgucccaggcaaaaugguugacugguugucagaccggccugaggcuaccuucagagcucggcuggauuuaggcaucccaggugaugugcccaaauaugacauaauauuuguuaaugugaggaccccauauaaauaccaucacuaucagcagugugaagaccaugccauuaagcuuagcauguugaccaagaaagcuugucugcaucugaaucccggcggaaccugugucagcauagguuaugguuacgcugacagggccagcgaaagcaucauuggugcuauagcgcggcaguucaaguuuucccggguaugcaaaccgaaauccucacuugaagagacggaaguucuguuuguauucauuggguacgaucgcaaggcccguacgcacaauucuuacaagcuuucaucaaccuugaccaacauuuauacagguuccagacuccacgaagccggaugugcacccucauaucauguggugcgaggggauauugccacggccaccgaaggagugauuauaaaugcugcuaacagcaaaggacaaccuggcggaggggugugcggagcgcuguauaagaaauucccggaaagcuucgauuuacagccgaucgaaguaggaaaagcgcgacuggucaaaggugcagcuaaacauaucauucaugccguaggaccaaacuucaacaaaguuucggagguugaaggugacaaacaguuggcagaggcuuaugaguccaucgcuaagauugucaacgauaacaauuacaagucaguagcgauuccacuguuguccaccggcaucuuuuccgggaacaaagaucgacuaacccaaucauugaaccauuugcugacagcuuuagacaccacugaugcagauguagccauauacugcagggacaagaaaugggaaaugacucucaaggaagcaguggcuaggagagaagcaguggaggagauaugcauauccgacgacucuucagugacagaaccugaugcagagcuggugagggugcauccgaagaguucuuuggcuggaaggaagggcuacagcacaagcgauggcaaaacuuucucauauuuggaagggaccaaguuucaccaggcggccaaggauauagcagaaauuaaugccauguggcccguugcaacggaggccaaugagcagguaugcauguauauccucggagaaagcaugagcaguauuaggucgaaaugccccgucgaagagucggaagccuccacaccaccuagcacgcugccuugcuugugcauccaugccaugacuccagaaagaguacagcgccuaaaagccucacguccagaacaaauuacugugugcucauccuuuccauugccgaaguauagaaucacuggugugcagaagauccaaugcucccagccuauauuguucucaccgaaagugccugcguauauucauccaaggaaguaucucguggaaacaccaccgguagacgagacuccggagccaucggcagagaaccaauccacagaggggacaccugaacaaccaccacuuauaaccgaggaugagaccaggacuagaacgccugagccgaucaucaucgaagaggaagaagaggauagcauaaguuugcugucagauggcccgacccaccaggugcugcaagucgaggcagacauucacgggccgcccucuguaucuagcucauccugguccauuccucaugcauccgacuuugauguggacaguuuauccauacuugacacccuggagggagcuagcgugaccagcggggcaacgucagccgagacuaacucuuacuucgcaaagaguauggaguuucuggcgcgaccggugccugcgccucgaacaguauucaggaacccuccacaucccgcuccgcgcacaagaacaccgucacuugcacccagcagggccugcucgagaaccagccuaguuuccaccccgccaggcgugaauagggugaucacuagagaggagcucgaggcgcuuaccccgucacgcacuccuagcaggucggucucgagaaccagccuggucuccaacccgccaggcguaaauagggugauuacaagagaggaguuugaggcguucguagcacaacaacaaugacgguuugaugcgggugcauacaucuuuuccuccgacaccggucaagggcauuuacaacaaaaaucaguaaggcaaacggugcuauccgaagugguguuggagaggaccgaauuggagauuucguaugccccgcgccucgaccaagaaaaagaagaauuacuacgcaagaaauuacaguuaaaucccacaccugcuaacagaagcagauaccaguccaggaagguggagaacaugaaagccauaacagcuagacguauucugcaaggccuagggcauuauuugaaggcagaaggaaaaguggagugcuaccgaacccugcauccuguuccuuuguauucaucuagugugaaccgugccuuuucaagccccaaggucgcaguggaagccuguaacgccauguugaaagagaacuuuccgacuguggcuucuuacuguauuauuccagaguacgaugccuauuuggacaugguugacggagcuucaugcugcuuagacacugccaguuuuugcccugcaaagcugcgcagcuuuccaaagaaacacuccuauuuggaacccacaauacgaucggcagugccuucagcgauccagaacacgcuccagaacguccuggcagcugccacaaaaagaaauugcaaugucacgcaaaugagagaauugcccguauuggauucggcggccuuuaauguggaaugcuucaagaaauaugcguguaauaaugaauauugggaaacguuuaaagaaaaccccaucaggcuuacugaagaaaacgugguaaauuacauuaccaaauuaaaaggaccaaaagcugcugcucuuuuugcgaagacacauaauuugaauauguugcaggacauaccaauggacagguuuguaauggacuuaaagagagacgugaaagugacuccaggaacaaaacauacugaagaacggcccaagguacaggugauccaggcugccgauccgcuagcaacagcguaucugugcggaauccaccgagagcugguuaggagauuaaaugcgguccugcuuccgaacauucauacacuguuugauaugucggcugaagacuuugacgcuauuauagccgagcacuuccagccuggggauuguguucuggaaacugacaucgcgucguuugauaaaagugaggacgacgccauggcucugaccgcguuaaugauucuggaagacuuagguguggacgcagagcuguugacgcugauugaggcggcuuucggcgaaauuucaucaauacauuugcccacuaaaacuaaauuuaaauucggagccaugaugaaaucuggaauguuccucacacuguuugugaacacagucauuaacauuguaaucgcaagcagaguguugagagaacggcuaaccggaucaccaugugcagcauucauuggagaugacaauaucgugaaaggagucaaaucggacaaauuaauggcagacaggugcgccaccugguugaauauggaagucaagauuauagaugcuguggugggcgagaaagcgccuuauuucuguggaggguuuauuuugugugacuccgugaccggcacagcgugccguguggcagacccccuaaaaaggcuguuuaagcuuggcaaaccucuggcagcagacgaugaacaugaugaugacaggagaagggcauugcaugaagagucaacacgcuggaaccgaguggguauucuuucagagcugugcaaggcaguagaaucaagguaugaaaccguaggaacuuccaucauaguuauggccaugacuacucuagcuagcaguguuaaaucauucagcuaccugagaggggccccuauaacucucuacggcuaaccugaauggacuacgacauagucuaguccgccaagucuagcauauggccacc

SEQ ID NO: 93 - DNA, 7578 bp, Artificial Sequence
  Nucleic acid sequence encoding RNA construct
atgggcggcgcatgagagaagcccagaccaattacctacccaaaatggagaaagttcacgttgacatcgaggaagacagcccattcctcagagctttgcagcggagcttcccgcagtttgaggtagaagccaagcaggtcactgataatgaccatgctaatgccagagcgttttcgcatctggcttcaaaactgatcgaaacggaggtggacccatccgacacgatccttgacattggaagtgcgcccgcccgcagaatgtattctaagcacaagtatcattgtatctgtccgatgagatgtgcggaagatccggacagattgtataagtatgcaactaagctgaagaaaaactgtaaggaaataactgataaggaattggacaagaaaatgaaggagctggccgccgtcatgagcgaccctgacctggaaactgagactatgtgcctccacgacgacgagtcgtgtcgctacgaagggcaagtcgctgtttaccaggatgtatacgcggttgacggaccgacaagtctctatcaccaagccaataagggagttagagtcgcctactggataggctttgacaccaccccttttatgtttaagaacttggctggagcatatccatcatactctaccaactgggccgacgaaaccgtgttaacggctcgtaacataggcctatgcagctctgacgttatggagcggtcacgtagagggatgtccattcttagaaagaagtatttgaaaccatccaacaatgttctattctctgttggctcgaccatctaccacgagaagagggacttactgaggagctggcacctgccgtctgtatttcacttacgtggcaagcaaaattacacatgtcggtgtgagactatagttagttgcgacgggtacgtcgttaaaagaatagctatcagtccaggcctgtatgggaagccttcaggctatgctgctacgatgcaccgcgagggattcttgtgctgcaaagtgacagacacattgaacggggagagggtctcttttcccgtgtgcacgtatgtgccagctacattgtgtgaccaaatgactggcatactggcaacagatgtcagtgcggacgacgcgcaaaaactgctggttgggctcaaccagcgtatagtcgtcaacggtcgcacccagagaaacaccaataccatgaaaaattaccttttgcccgtagtggcccaggcatttgctaggtgggcaaaggaatataaggaagatcaagaagatgaaaggccactaggactacgagatagacagttagtcatggggtgttgttgggcttttagaaggcacaagataacatctatttataagcgcccggatacccaaaccatcatcaaagtgaacagcgatttccactcattcgtgctgcccaggataggcagtaacacattggagatcgggctgagaacaagaatcaggaaaatgttagaggagcacaaggagccgtcacctctcattaccgccgaggacgtacaagaagctaagtgcgcagccgatgaggctaaggaggtgcgtgaagccgaggagttgcgcgcagctctaccacctttggcagctgatgttgaggagcccactctggaagccgatgtcgacttgatgttacaagaggctggggccggctcagtggagacacctcgtggcttgataaaggttaccagctacgatggcgaggacaagatcggctcttacgctgtgctttctccgcaggctgtactcaagagtgaaaaattatcttgcatccaccctctcgctgaacaagtcatagtgataacacactctggccgaaaagggcgttatgccgtggaaccataccatggtaaagtagtggtgccagagggacatgcaatacccgtccaggactttcaagctctgagtgaaagtgccaccattgtgtacaacgaacgtgagttcgtaaacaggtacctgcaccatattgccacacatggaggagcgctgaacactgatgaagaatattacaaaactgtcaagcccagcgagcacgacggcgaatacctgtacgacatcgacaggaaacagtgcgtcaagaaagaactagtcactgggctagggctcacaggcgagctggtggatcctcccttccatgaattcgcctacgagagtctgagaacacgaccagccgctccttaccaagtaccaaccataggggtgtatggcgtgccaggatcaggcaagtctggcatcattaaaagcgcagtcaccaaaaaagatctagtggtgagcgccaagaaagaaaactgtgcagaaattataagggacgtcaagaaaatgaaagggctggacgtcaatgccagaactgtggactcagtgctcttgaatggatgcaaacaccccgtagagaccctgtatattgacgaagcttttgcttgtcatgcaggtactctcagagcgctcatagccattataagacctaaaaaggcagtgctctgcggggatcccaaacagtgcggtttttttaacatgatgtgcctgaaagtgcattttaaccacgagatttgcacacaagtcttccacaaaagcatctctcgccgttgcactaaatctgtgacttcggtcgtctcaaccttgttttacgacaaaaaaatgagaacgacgaatccgaaagagactaagattgtgattgacactaccggcagtaccaaacctaagcaggacgatctcattctcacttgtttcagagggtgggtgaagcagttgcaaatagattacaaaggcaacgaaataatgacggcagctgcctctcaagggctgacccgtaaaggtgtgtatgccgttcggtacaaggtgaatgaaaatcctctgtacgcacccacctcagaacatgtgaacgtcctactgacccgcacggaggaccgcatcgtgtggaaaacactagccggcgacccatggataaaaacactgactgccaagtaccctgggaatttcactgccacgatagaggagtggcaagcagagcatgatgccatcatgaggcacatcttggagagaccggaccctaccgacgtcttccagaataaggcaaacgtgtgttgggccaaggctttagtgccggtgctgaagaccgctggcatagacatgaccactgaacaatggaacactgtggattattttgaaacggacaaagctcactcagcagagatagtattgaaccaactatgcgtgaggttctttggactcgatctggactccggtctattttctgcacccactgttccgttatccattaggaataatcactgggataactccccgtcgcctaacatgtacgggctgaataaagaagtggtccgtcagctctctcgcaggtacccacaactgcctcgggcagttgccactggaagagtctatgacatgaacactggtacactgcgcaattatgatccgcgcataaacctagtacctgtaaacagaagactgcctcatgctttagtcctccaccataatgaacacccacagagtgacttttcttcattcgtcagcaaattgaagggcagaactgtcctggtggtcggggaaaagttgtccgtcccaggcaaaatggttgactggttgtcagaccggcctgaggctaccttcagagctcggctggatttaggcatcccaggtgatgtgcccaaatatgacataatatttgttaatgtgaggaccccatataaataccatcactatcagcagtgtgaagaccatgccattaagcttagcatgttgaccaagaaagcttgtctgcatctgaatcccggcggaacctgtgtcagcataggttatggttacgctgacagggccagcgaaagcatcattggtgctatagcgcggcagttcaagttttcccgggtatgcaaaccgaaatcctcacttgaagagacggaagttctgtttgtattcattgggtacgatcgcaaggcccgtacgcacaattcttacaagctttcatcaaccttgaccaacatttatacaggttccagactccacgaagccggatgtgcaccctcatatcatgtggtgcgaggggatattgccacggccaccgaaggagtgattataaatgctgctaacagcaaaggacaacctggcggaggggtgtgcggagcgctgtataagaaattcccggaaagcttcgatttacagccgatcgaagtaggaaaagcgcgactggtcaaaggtgcagctaaacatatcattcatgccgtaggaccaaacttcaacaaagtttcggaggttgaaggtgacaaacagttggcagaggcttatgagtccatcgctaagattgtcaacgataacaattacaagtcagtagcgattccactgttgtccaccggcatcttttccgggaacaaagatcgactaacccaatcattgaaccatttgctgacagctttagacaccactgatgcagatgtagccatatactgcagggacaagaaatgggaaatgactctcaaggaagcagtggctaggagagaagcagtggaggagatatgcatatccgacgactcttcagtgacagaacctgatgcagagctggtgagggtgcatccgaagagttctttggctggaaggaagggctacagcacaagcgatggcaaaactttctcatatttggaagggaccaagtttcaccaggcggccaaggatatagcagaaattaatgccatgtggcccgttgcaacggaggccaatgagcaggtatgcatgtatatcctcggagaaagcatgagcagtattaggtcgaaatgccccgtcgaagagtcggaagcctccacaccacctagcacgctgccttgcttgtgcatccatgccatgactccagaaagagtacagcgcctaaaagcctcacgtccagaacaaattactgtgtgctcatcctttccattgccgaagtatagaatcactggtgtgcagaagatccaatgctcccagcctatattgttctcaccgaaagtgcctgcgtatattcatccaaggaagtatctcgtggaaacaccaccggtagacgagactccggagccatcggcagagaaccaatccacagaggggacacctgaacaaccaccacttataaccgaggatgagaccaggactagaacgcctgagccgatcatcatcgaagaggaagaagaggatagcataagtttgctgtcagatggcccgacccaccaggtgctgcaagtcgaggcagacattcacgggccgccctctgtatctagctcatcctggtccattcctcatgcatccgactttgatgtggacagtttatccatacttgacaccctggagggagctagcgtgaccagcggggcaacgtcagccgagactaactcttacttcgcaaagagtatggagtttctggcgcgaccggtgcctgcgcctcgaacagtattcaggaaccctccacatcccgctccgcgcacaagaacaccgtcacttgcacccagcagggcctgctcgagaaccagcctagtttccaccccgccaggcgtgaatagggtgatcactagagaggagctcgaggcgcttaccccgtcacgcactcctagcaggtcggtctcgagaaccagcctggtctccaacccgccaggcgtaaatagggtgattacaagagaggagtttgaggcgttcgtagcacaacaacaatgacggtttgatgcgggtgcatacatcttttcctccgacaccggtcaagggcatttacaacaaaaatcagtaaggcaaacggtgctatccgaagtggtgttggagaggaccgaattggagatttcgtatgccccgcgcctcgaccaagaaaaagaagaattactacgcaagaaattacagttaaatcccacacctgctaacagaagcagataccagtccaggaaggtggagaacatgaaagccataacagctagacgtattctgcaaggcctagggcattatttgaaggcagaaggaaaagtggagtgctaccgaaccctgcatcctgttcctttgtattcatctagtgtgaaccgtgccttttcaagccccaaggtcgcagtggaagcctgtaacgccatgttgaaagagaactttccgactgtggcttcttactgtattattccagagtacgatgcctatttggacatggttgacggagcttcatgctgcttagacactgccagtttttgccctgcaaagctgcgcagctttccaaagaaacactcctatttggaacccacaatacgatcggcagtgccttcagcgatccagaacacgctccagaacgtcctggcagctgccacaaaaagaaattgcaatgtcacgcaaatgagagaattgcccgtattggattcggcggcctttaatgtggaatgcttcaagaaatatgcgtgtaataatgaatattgggaaacgtttaaagaaaaccccatcaggcttactgaagaaaacgtggtaaattacattaccaaattaaaaggaccaaaagctgctgctctttttgcgaagacacataatttgaatatgttgcaggacataccaatggacaggtttgtaatggacttaaagagagacgtgaaagtgactccaggaacaaaacatactgaagaacggcccaaggtacaggtgatccaggctgccgatccgctagcaacagcgtatctgtgcggaatccaccgagagctggttaggagattaaatgcggtcctgcttccgaacattcatacactgtttgatatgtcggctgaagactttgacgctattatagccgagcacttccagcctggggattgtgttctggaaactgacatcgcgtcgtttgataaaagtgaggacgacgccatggctctgaccgcgttaatgattctggaagacttaggtgtggacgcagagctgttgacgctgattgaggcggctttcggcgaaatttcatcaatacatttgcccactaaaactaaatttaaattcggagccatgatgaaatctggaatgttcctcacactgtttgtgaacacagtcattaacattgtaatcgcaagcagagtgttgagagaacggctaaccggatcaccatgtgcagcattcattggagatgacaatatcgtgaaaggagtcaaatcggacaaattaatggcagacaggtgcgccacctggttgaatatggaagtcaagattatagatgctgtggtgggcgagaaagcgccttatttctgtggagggtttattttgtgtgactccgtgaccggcacagcgtgccgtgtggcagaccccctaaaaaggctgtttaagcttggcaaacctctggcagcagacgatgaacatgatgatgacaggagaagggcattgcatgaagagtcaacacgctggaaccgagtgggtattctttcagagctgtgcaaggcagtagaatcaaggtatgaaaccgtaggaacttccatcatagttatggccatgactactctagctagcagtgttaaatcattcagctacctgagaggggcccctataactctctacggctaacctgaatggactacgacatagtctagtccgccaagtctagcatatggccacc

SEQ ID NO: 94 - DNA, 7596 bp, Artificial Sequence
  Recombinant vector
taatacgactcactatagatgggcggcgcatgagagaagcccagaccaattacctacccaaaatggagaaagttcacgttgacatcgaggaagacagcccattcctcagagctttgcagcggagcttcccgcagtttgaggtagaagccaagcaggtcactgataatgaccatgctaatgccagagcgttttcgcatctggcttcaaaactgatcgaaacggaggtggacccatccgacacgatccttgacattggaagtgcgcccgcccgcagaatgtattctaagcacaagtatcattgtatctgtccgatgagatgtgcggaagatccggacagattgtataagtatgcaactaagctgaagaaaaactgtaaggaaataactgataaggaattggacaagaaaatgaaggagctggccgccgtcatgagcgaccctgacctggaaactgagactatgtgcctccacgacgacgagtcgtgtcgctacgaagggcaagtcgctgtttaccaggatgtatacgcggttgacggaccgacaagtctctatcaccaagccaataagggagttagagtcgcctactggataggctttgacaccaccccttttatgtttaagaacttggctggagcatatccatcatactctaccaactgggccgacgaaaccgtgttaacggctcgtaacataggcctatgcagctctgacgttatggagcggtcacgtagagggatgtccattcttagaaagaagtatttgaaaccatccaacaatgttctattctctgttggctcgaccatctaccacgagaagagggacttactgaggagctggcacctgccgtctgtatttcacttacgtggcaagcaaaattacacatgtcggtgtgagactatagttagttgcgacgggtacgtcgttaaaagaatagctatcagtccaggcctgtatgggaagccttcaggctatgctgctacgatgcaccgcgagggattcttgtgctgcaaagtgacagacacattgaacggggagagggtctcttttcccgtgtgcacgtatgtgccagctacattgtgtgaccaaatgactggcatactggcaacagatgtcagtgcggacgacgcgcaaaaactgctggttgggctcaaccagcgtatagtcgtcaacggtcgcacccagagaaacaccaataccatgaaaaattaccttttgcccgtagtggcccaggcatttgctaggtgggcaaaggaatataaggaagatcaagaagatgaaaggccactaggactacgagatagacagttagtcatggggtgttgttgggcttttagaaggcacaagataacatctatttataagcgcccggatacccaaaccatcatcaaagtgaacagcgatttccactcattcgtgctgcccaggataggcagtaacacattggagatcgggctgagaacaagaatcaggaaaatgttagaggagcacaaggagccgtcacctctcattaccgccgaggacgtacaagaagctaagtgcgcagccgatgaggctaaggaggtgcgtgaagccgaggagttgcgcgcagctctaccacctttggcagctgatgttgaggagcccactctggaagccgatgtcgacttgatgttacaagaggctggggccggctcagtggagacacctcgtggcttgataaaggttaccagctacgatggcgaggacaagatcggctcttacgctgtgctttctccgcaggctgtactcaagagtgaaaaattatcttgcatccaccctctcgctgaacaagtcatagtgataacacactctggccgaaaagggcgttatgccgtggaaccataccatggtaaagtagtggtgccagagggacatgcaatacccgtccaggactttcaagctctgagtgaaagtgccaccattgtgtacaacgaacgtgagttcgtaaacaggtacctgcaccatattgccacacatggaggagcgctgaacactgatgaagaatattacaaaactgtcaagcccagcgagcacgacggcgaatacctgtacgacatcgacaggaaacagtgcgtcaagaaagaactagtcactgggctagggctcacaggcgagctggtggatcctcccttccatgaattcgcctacgagagtctgagaacacgaccagccgctccttaccaagtaccaaccataggggtgtatggcgtgccaggatcaggcaagtctggcatcattaaaagcgcagtcaccaaaaaagatctagtggtgagcgccaagaaagaaaactgtgcagaaattataagggacgtcaagaaaatgaaagggctggacgtcaatgccagaactgtggactcagtgctcttgaatggatgcaaacaccccgtagagaccctgtatattgacgaagcttttgcttgtcatgcaggtactctcagagcgctcatagccattataagacctaaaaaggcagtgctctgcggggatcccaaacagtgcggtttttttaacatgatgtgcctgaaagtgcattttaaccacgagatttgcacacaagtcttccacaaaagcatctctcgccgttgcactaaatctgtgacttcggtcgtctcaaccttgttttacgacaaaaaaatgagaacgacgaatccgaaagagactaagattgtgattgacactaccggcagtaccaaacctaagcaggacgatctcattctcacttgtttcagagggtgggtgaagcagttgcaaatagattacaaaggcaacgaaataatgacggcagctgcctctcaagggctgacccgtaaaggtgtgtatgccgttcggtacaaggtgaatgaaaatcctctgtacgcacccacctcagaacatgtgaacgtcctactgacccgcacggaggaccgcatcgtgtggaaaacactagccggcgacccatggataaaaacactgactgccaagtaccctgggaatttcactgccacgatagaggagtggcaagcagagcatgatgccatcatgaggcacatcttggagagaccggaccctaccgacgtcttccagaataaggcaaacgtgtgttgggccaaggctttagtgccggtgctgaagaccgctggcatagacatgaccactgaacaatggaacactgtggattattttgaaacggacaaagctcactcagcagagatagtattgaaccaactatgcgtgaggttctttggactcgatctggactccggtctattttctgcacccactgttccgttatccattaggaataatcactgggataactccccgtcgcctaacatgtacgggctgaataaagaagtggtccgtcagctctctcgcaggtacccacaactgcctcgggcagttgccactggaagagtctatgacatgaacactggtacactgcgcaattatgatccgcgcataaacctagtacctgtaaacagaagactgcctcatgctttagtcctccaccataatgaacacccacagagtgacttttcttcattcgtcagcaaattgaagggcagaactgtcctggtggtcggggaaaagttgtccgtcccaggcaaaatggttgactggttgtcagaccggcctgaggctaccttcagagctcggctggatttaggcatcccaggtgatgtgcccaaatatgacataatatttgttaatgtgaggaccccatataaataccatcactatcagcagtgtgaagaccatgccattaagcttagcatgttgaccaagaaagcttgtctgcatctgaatcccggcggaacctgtgtcagcataggttatggttacgctgacagggccagcgaaagcatcattggtgctatagcgcggcagttcaagttttcccgggtatgcaaaccgaaatcctcacttgaagagacggaagttctgtttgtattcattgggtacgatcgcaaggcccgtacgcacaattcttacaagctttcatcaaccttgaccaacatttatacaggttccagactccacgaagccggatgtgcaccctcatatcatgtggtgcgaggggatattgccacggccaccgaaggagtgattataaatgctgctaacagcaaaggacaacctggcggaggggtgtgcggagcgctgtataagaaattcccggaaagcttcgatttacagccgatcgaagtaggaaaagcgcgactggtcaaaggtgcagctaaacatatcattcatgccgtaggaccaaacttcaacaaagtttcggaggttgaaggtgacaaacagttggcagaggcttatgagtccatcgctaagattgtcaacgataacaattacaagtcagtagcgattccactgttgtccaccggcatcttttccgggaacaaagatcgactaacccaatcattgaaccatttgctgacagctttagacaccactgatgcagatgtagccatatactgcagggacaagaaatgggaaatgactctcaaggaagcagtggctaggagagaagcagtggaggagatatgcatatccgacgactcttcagtgacagaacctgatgcagagctggtgagggtgcatccgaagagttctttggctggaaggaagggctacagcacaagcgatggcaaaactttctcatatttggaagggaccaagtttcaccaggcggccaaggatatagcagaaattaatgccatgtggcccgttgcaacggaggccaatgagcaggtatgcatgtatatcctcggagaaagcatgagcagtattaggtcgaaatgccccgtcgaagagtcggaagcctccacaccacctagcacgctgccttgcttgtgcatccatgccatgactccagaaagagtacagcgcctaaaagcctcacgtccagaacaaattactgtgtgctcatcctttccattgccgaagtatagaatcactggtgtgcagaagatccaatgctcccagcctatattgttctcaccgaaagtgcctgcgtatattcatccaaggaagtatctcgtggaaacaccaccggtagacgagactccggagccatcggcagagaaccaatccacagaggggacacctgaacaaccaccacttataaccgaggatgagaccaggactagaacgcctgagccgatcatcatcgaagaggaagaagaggatagcataagtttgctgtcagatggcccgacccaccaggtgctgcaagtcgaggcagacattcacgggccgccctctgtatctagctcatcctggtccattcctcatgcatccgactttgatgtggacagtttatccatacttgacaccctggagggagctagcgtgaccagcggggcaacgtcagccgagactaactcttacttcgcaaagagtatggagtttctggcgcgaccggtgcctgcgcctcgaacagtattcaggaaccctccacatcccgctccgcgcacaagaacaccgtcacttgcacccagcagggcctgctcgagaaccagcctagtttccaccccgccaggcgtgaatagggtgatcactagagaggagctcgaggcgcttaccccgtcacgcactcctagcaggtcggtctcgagaaccagcctggtctccaacccgccaggcgtaaatagggtgattacaagagaggagtttgaggcgttcgtagcacaacaacaatgacggtttgatgcgggtgcatacatcttttcctccgacaccggtcaagggcatttacaacaaaaatcagtaaggcaaacggtgctatccgaagtggtgttggagaggaccgaattggagatttcgtatgccccgcgcctcgaccaagaaaaagaagaattactacgcaagaaattacagttaaatcccacacctgctaacagaagcagataccagtccaggaaggtggagaacatgaaagccataacagctagacgtattctgcaaggcctagggcattatttgaaggcagaaggaaaagtggagtgctaccgaaccctgcatcctgttcctttgtattcatctagtgtgaaccgtgccttttcaagccccaaggtcgcagtggaagcctgtaacgccatgttgaaagagaactttccgactgtggcttcttactgtattattccagagtacgatgcctatttggacatggttgacggagcttcatgctgcttagacactgccagtttttgccctgcaaagctgcgcagctttccaaagaaacactcctatttggaacccacaatacgatcggcagtgccttcagcgatccagaacacgctccagaacgtcctggcagctgccacaaaaagaaattgcaatgtcacgcaaatgagagaattgcccgtattggattcggcggcctttaatgtggaatgcttcaagaaatatgcgtgtaataatgaatattgggaaacgtttaaagaaaaccccatcaggcttactgaagaaaacgtggtaaattacattaccaaattaaaaggaccaaaagctgctgctctttttgcgaagacacataatttgaatatgttgcaggacataccaatggacaggtttgtaatggacttaaagagagacgtgaaagtgactccaggaacaaaacatactgaagaacggcccaaggtacaggtgatccaggctgccgatccgctagcaacagcgtatctgtgcggaatccaccgagagctggttaggagattaaatgcggtcctgcttccgaacattcatacactgtttgatatgtcggctgaagactttgacgctattatagccgagcacttccagcctggggattgtgttctggaaactgacatcgcgtcgtttgataaaagtgaggacgacgccatggctctgaccgcgttaatgattctggaagacttaggtgtggacgcagagctgttgacgctgattgaggcggctttcggcgaaatttcatcaatacatttgcccactaaaactaaatttaaattcggagccatgatgaaatctggaatgttcctcacactgtttgtgaacacagtcattaacattgtaatcgcaagcagagtgttgagagaacggctaaccggatcaccatgtgcagcattcattggagatgacaatatcgtgaaaggagtcaaatcggacaaattaatggcagacaggtgcgccacctggttgaatatggaagtcaagattatagatgctgtggtgggcgagaaagcgccttatttctgtggagggtttattttgtgtgactccgtgaccggcacagcgtgccgtgtggcagaccccctaaaaaggctgtttaagcttggcaaacctctggcagcagacgatgaacatgatgatgacaggagaagggcattgcatgaagagtcaacacgctggaaccgagtgggtattctttcagagctgtgcaaggcagtagaatcaaggtatgaaaccgtaggaacttccatcatagttatggccatgactactctagctagcagtgttaaatcattcagctacctgagaggggcccctataactctctacggctaacctgaatggactacgacatagtctagtccgccaagtctagcatatggccacc

SEQ ID NO: 95 - protein, 222 aa, Simian Virus 5
MDPTDLSFSPDEINKLIETGLNTVEYFTSQQVTGTSSLGKNTIPPGVTGLLTNAAEAKIQESTNHQKGSVGGGAKPKKPRPKIAIVPADDKTVPGKPIPNPLLGLDSTPSTQTVLDLSGKTLPSGSYKGVKLAKFGKENLMTRFIEEPRENPIATSSPIDFKRGRDTGGFHRREYSIGWVGDEVKVTEWCNPSCSPITAAARRFECTCHQCPVTCSECERDT

SEQ ID NO: 96 - DNA, 666 bp, Simian Virus 5
atggatcccactgatctgagcttctccccagatgagatcaataagctcatagagacaggcctgaatactgtagagtattttacttcccaacaagtcacaggaacatcctctcttggaaagaatacaataccaccaggggtcacaggactactaaccaatgctgcagaggcaaagatccaagagtcaactaaccatcagaagggctcagttggtgggggtgcaaaaccaaagaaaccgcgaccaaaaattgccattgtgccagcagatgacaaaacagtgcccggaaagccgatcccaaaccctctattaggtctggactccaccccgagcacccaaactgtgcttgatctaagtgggaaaacattaccatcaggatcctataagggggttaagcttgcgaaatttggaaaagaaaatctgatgacacggttcatcgaggaacccagagagaatcctatcgcaaccagttcccccatcgattttaagaggggcagggataccggcgggttccatagaagggagtactcaatcggatgggtgggagatgaagtcaaggtcactgagtggtgcaatccatcctgttctccaatcaccgctgcagcaaggcgatttgaatgcacttgtcaccagtgtccagtcacttgctctgaatgtgaacgagatact

SEQ ID NO: 97 - DNA, 666 bp, Artificial Sequence
  Codon optimised DNA encoding SV5B protein
atggaccctaccgacctgagcttcagccccgacgagatcaacaagctgatcgagacaggcctgaacaccgtggaatacttcaccagccagcaagtgaccggcacaagcagcctgggcaagaacacaattcctccaggcgtgaccggcctgctgacaaatgctgccgaggccaagatccaagagagcaccaaccaccagaagggctctgttggaggcggagccaagcctaagaagcccagacctaagatcgccatcgtgcccgccgacgataagacagtgcctggcaagcccattcctaatcctctgctgggcctcgacagcacccctagcacacagacagtgctggatctgagcggcaagacactgcctagcggcagctataagggcgtgaagctggccaagttcggcaaagaaaacctgatgacccggttcatcgaggaacccagagagaaccctatcgccaccagctctcccatcgacttcaagagaggcagagacaccggcggcttccacagaagagagtacagcattggctgggtcggagatgaagtgaaagtgaccgagtggtgcaaccccagctgcagccctattacagccgccgctagaagattcgagtgcacctgtcaccagtgtcctgtgacctgtagcgagtgcgagagagacaca

SEQ ID NO: 98 - RNA, 666 nt, Artificial Sequence
  Codon optimised RNA encoding SV5B protein
auggacccuaccgaccugagcuucagccccgacgagaucaacaagcugaucgagacaggccugaacaccguggaauacuucaccagccagcaagugaccggcacaagcagccugggcaagaacacaauuccuccaggcgugaccggccugcugacaaaugcugccgaggccaagauccaagagagcaccaaccaccagaagggcucuguuggaggcggagccaagccuaagaagcccagaccuaagaucgccaucgugcccgccgacgauaagacagugccuggcaagcccauuccuaauccucugcugggccucgacagcaccccuagcacacagacagugcuggaucugagcggcaagacacugccuagcggcagcuauaagggcgugaagcuggccaaguucggcaaagaaaaccugaugacccgguucaucgaggaacccagagagaacccuaucgccaccagcucucccaucgacuucaagagaggcagagacaccggcggcuuccacagaagagaguacagcauuggcugggucggagaugaagugaaagugaccgaguggugcaaccccagcugcagcccuauuacagccgccgcuagaagauucgagugcaccugucaccaguguccugugaccuguagcgagugcgagagagacaca

SEQ ID NO: 99 - protein, 225 aa, Simian Virus 5
MAEEPTYTTEQVDELIHAGLGTVDFFLSRPIDAQSSLGKGSIPPGVTAVLTSAAEAKSKPVAAGPVKPRRKKVISNTTPYTIADNIPPEKLPINTPIPNPLLPLARPHGKMTDIDIVTGNITEGSYKGVELAKLGKQTLLTRFTSNEPVSSAGSAQDPNFKRGGANRERARGNHRREWSIAWVGDQVKVFEWCNPRCAPVTASARKFTCTCGSCPSICGECEGDH

SEQ ID NO: 100 - DNA, 675 bp, Simian Virus 5
atggccgaggaaccaacatacaccactgagcaagttgatgaattaatccatgctggactgggaacagtagatttcttcctatctagacccatagatgctcagtcttctttaggcaaaggcagcatcccaccaggtgtcacagctgttctaactagtgcagcggaggcaaaatccaaaccagttgctgctggtccagttaaacccaggcggaagaaagtgatcagcaatactactccatacactattgcagacaatattccacctgagaagctaccgatcaacactccaatacccaatccattacttccactggcacgccctcacggaaagatgacagacattgacattgtcactgggaacattacagaaggatcgtacaaaggtgtggagcttgctaaattagggaagcagacactactcacaaggttcacctcgaatgagccagtctcctcagctggatccgcccaagaccccaactttaagagggggggagctaatagagaaagagcaagaggcaaccataggagagaatggagtattgcatgggtcggagatcaggtcaaagtcttcgagtggtgtaatcccaggtgtgccccagtcacggcctcagctcgcaagttcacctgcacatgcggatcctgccccagcatctgcggagaatgtgaaggagatcat

SEQ ID NO: 101 - DNA, 675 bp, Artificial Sequence
  Codon optimised DNA encoding PIV2 Non-structural protein V
atggccgaggaacctacctacaccaccgaacaggtggacgagctgattcacgccggactgggaaccgtggacttctttctgtcccggcctatcgatgcccagagcagcctcggcaagggatctattcctcctggcgtgacagccgtgctgacatctgccgccgaggccaagtctaaacctgtggctgctggacccgtgaagcccagacggaagaaagtgatcagcaacaccacaccttacacgatcgccgacaacatccctcctgagaagctgcccatcaacacccctattcctaatcctctgctgcccctggccagacctcacggcaagatgaccgacatcgatatcgtgaccggcaacatcaccgagggcagctacaaaggcgtggaactggccaagctgggcaagcagacactgctgaccagattcaccagcaacgagcctgtgtctagcgccggctctgcccaggatcctaacttcaaaagaggcggagccaacagagagagagccagaggcaaccatcggagagagtggtctattgcctgggtcggagatcaagtgaaggtgttcgagtggtgcaaccccagatgtgcccctgtgacagccagcgccagaaagttcacctgtacctgcggcagctgtcccagcatttgcggagagtgtgaaggcgaccat

SEQ ID NO: 102 - RNA, 675 nt, Artificial Sequence
  Codon optimised RNA encoding PIV2 Non-structural protein V
auggccgaggaaccuaccuacaccaccgaacagguggacgagcugauucacgccggacugggaaccguggacuucuuucugucccggccuaucgaugcccagagcagccucggcaagggaucuauuccuccuggcgugacagccgugcugacaucugccgccgaggccaagucuaaaccuguggcugcuggacccgugaagcccagacggaagaaagugaucagcaacaccacaccuuacacgaucgccgacaacaucccuccugagaagcugcccaucaacaccccuauuccuaauccucugcugccccuggccagaccucacggcaagaugaccgacaucgauaucgugaccggcaacaucaccgagggcagcuacaaaggcguggaacuggccaagcugggcaagcagacacugcugaccagauucaccagcaacgagccugugucuagcgccggcucugcccaggauccuaacuucaaaagaggcggagccaacagagagagagccagaggcaaccaucggagagaguggucuauugccugggucggagaucaagugaagguguucgaguggugcaaccccagaugugccccugugacagccagcgccagaaaguucaccuguaccugcggcagcugucccagcauuugcggagagugugaaggcgaccau

SEQ ID NO: 103 - protein, 224 aa, Mumps virus
MDQFIKQDETGDLIETGMNVANHFLSAPIQGTNSLSKATIIPGVAPVLIGNPEQKNIQYPTTSHQGSKSKGRGSGARPIIVSSSEGGTGGTQVPEPLFAQTGQGGIVTTVYQDPTIQPTGSYRSVELAKIGKERMINRFVEKPRTSTPVTEFKRGAGSGCSRPDNPRGGHRREWSLSWVQGEVRVFEWCNPICSPITAAARFHSCKCGNCPAKCDQCERDYGPP

SEQ ID NO: 104 - DNA, 672 bp, Mumps virus
atggaccaatttataaaacaagatgagactggtgatttaattgagacaggaatgaacgttgcaaatcatttcctatccgcccccattcagggaaccaactcgttgagcaaggccacaatcatccctggcgttgcaccagtactcattggcaatccagagcaaaagaacattcagtaccccaccacatcacatcagggatccaagtcaaagggcagaggctcaggggccaggcccatcatagtctcatcctccgaaggaggcactggagggactcaggttcctgagccccttttcgcacaaacaggacaaggtggcattgtcaccaccgtttatcaggatccaactatccaaccaacaggttcatatcgaagtgtggaattggctaagataggaaaagagagaatgattaatcgatttgttgaaaaaccaagaacctcaacgccggtaacagaatttaagaggggggccgggagcggctgctcaaggccagacaatccaagaggagggcatagacgggaatggagcctcagctgggtccaaggagaggtccgggtctttgagtggtgcaaccccatatgctcacctatcactgccgcagcaagattccactcctgcaaatgtgggaattgccccgcaaagtgcgatcagtgcgaacgagattatggacctcct

SEQ ID NO: 105 - DNA, 672 bp, Artificial Sequence
  Codon optimised DNA encoding Mumps V protein
atggaccagttcatcaagcaggacgagacaggcgacctgatcgaaaccggcatgaacgtggccaaccacttcctgtctgcccctatccagggcaccaacagcctgagcaaggccacaattatccctggcgtggcccctgtgctgatcggcaatcctgagcagaagaacattcagtaccccaccaccagccaccagggcagcaagtctaaaggcagaggctctggcgctcggcccatcatcgtttctagtagcgaaggcggcaccggcggaacacaggttccagaacctctgtttgcccagacaggccaaggcggcatcgtgaccacagtgtaccaggatcctaccatccagcctaccggcagctacagaagcgtggaactggccaagatcggcaaagaacggatgatcaaccgcttcgtggaaaagcccagaaccagcacacccgtgaccgagttcaaaagaggcgccggaagcggctgcagcagacccgataatcctagaggcggccatcggagagagtggtccctgtcttgggttcagggcgaagtgcgggtgttcgagtggtgcaatcctatctgcagccccatcacagccgccgctagattccacagctgcaagtgcggaaactgccccgccaagtgtgaccagtgcgagagagattacggccctcct

SEQ ID NO: 106 - RNA, 672 nt, Artificial Sequence
  Codon optimised RNA encoding Mumps V protein
auggaccaguucaucaagcaggacgagacaggcgaccugaucgaaaccggcaugaacguggccaaccacuuccugucugccccuauccagggcaccaacagccugagcaaggccacaauuaucccuggcguggccccugugcugaucggcaauccugagcagaagaacauucaguaccccaccaccagccaccagggcagcaagucuaaaggcagaggcucuggcgcucggcccaucaucguuucuaguagcgaaggcggcaccggcggaacacagguuccagaaccucuguuugcccagacaggccaaggcggcaucgugaccacaguguaccaggauccuaccauccagccuaccggcagcuacagaagcguggaacuggccaagaucggcaaagaacggaugaucaaccgcuucguggaaaagcccagaaccagcacacccgugaccgaguucaaaagaggcgccggaagcggcugcagcagacccgauaauccuagaggcggccaucggagagaguggucccugucuuggguucagggcgaagugcggguguucgaguggugcaauccuaucugcagccccaucacagccgccgcuagauuccacagcugcaagugcggaaacugccccgccaagugugaccagugcgagagagauuacggcccuccu

SEQ ID NO: 107 - protein, 384 aa, Sendai virus
MDQDAFILKEDSEVEREAPGGRESLSDVIGFLDAVLSSEPTDIGGDRSWLHNTINTPQGPGSAHRAKSEGEGEVSTPSTQDNRSGEESRVSGRTSKPEAEAHAGNLDKQNIHRAFGGRTGTNSVSQDLGDGGDSGILENPPNERGYPRSGIEDENREMAAHPDKRGEDQAEGLPEEVRGGTSLPDEGEGGASNNGRSMEPGSSHSARVTGVLVIPSPELEEAVLRRNKRRPTNSGSKPLTPATVPGTRSPPLNRYNSTGSPPGKPPSTQDEHINSGDTPAVRVKDRKPPIGTRSVSDCPANGRPIHPGLETDSTKKGHRREHIIYERDGYIVDESWCNPVCSRIRVIPRRELCVCKTCPKVCKLCRDDIQCMRPDPFCREIFRS

SEQ ID NO: 108 - DNA, 1152 bp, Sendai virus
atggatcaagatgccttcattcttaaagaagattctgaagttgagagggaggcgccaggaggaagagagtcgctctcggatgttatcggattcctcgatgctgtcctgtcgagtgaaccaactgacatcggaggggacagaagctggctccacaacaccatcaacactccccaaggaccaggctctgcccatagagccaaaagtgagggcgaaggagaagtctcaacaccgtcgacccaagataatcgatcaggtgaggagagtagagtctctgggagaacaagcaagccagaggcagaagcacatgctggaaaccttgataaacaaaatatacaccgggcctttgggggaagaactggtacaaactctgtatctcaggatctgggcgatggaggagactccggaatccttgaaaatcccccaaatgagagaggatatccgagatcaggtattgaagatgaaaacagagagatggctgcgcaccctgataagaggggagaagaccaagctgaaggacttccagaagaggtacgaggaggtacatccctacctgatgaaggagaaggtggagcaagtaataatggaagaagcatggagcctggcagctcacatagtgcaagagtaactggggtcctggtgattcctagccccgaactcgaagaggctgtgctacggaggaacaaaagaagacctaccaacagtgggtccaaacctcttactccagcaaccgtgcctggcacccggtccccaccgctgaatcgttacaacagcacagggtcaccaccaggaaaacccccatctacacaggatgagcacatcaactctggggacacccccgccgtcagggtcaaagaccggaaaccaccaatagggacccgctctgtctcagattgtccagccaacggccgcccaatccacccgggtctagagaccgactcaacaaaaaaggggcataggagagaacacatcatctatgaaagagatggctacattgttgacgagtcttggtgtaatccagtctgctcaagaattcgagtcatcccgagacgcgagttatgtgtttgcaagacgtgccctaaagtctgcaaactatgcagagatgacattcaatgtatgcggcctgatcctttctgccgagaaatcttccgctcg

SEQ ID NO: 109 - DNA, 1152 bp, Artificial Sequence
  Codon optimised DNA encoding SeV V protein
atggaccaggacgccttcatcctgaaagaggacagcgaggtcgagagagaagcccctggcggaagagaaagcctgtccgatgtgatcggcttcctggatgccgtgctgagcagcgagcctacagatatcggcggcgatagaagctggctgcacaacaccatcaacacccctcaaggccctggctctgcccacagagctaagtctgaaggcgagggcgaagtgtctacccctagcacacaggacaacagaagcggcgaggaatccagagtgtccggcagaacaagcaagcctgaggccgaagctcacgccggcaatctggacaagcagaacatccacagagccttcggcggcagaaccggcacaaatagcgtgtcacaggacctcggagatggcggcgattctggcatcctggaaaaccctccaaacgagcggggctaccctagaagcggaatcgaggacgagaacagagagatggccgctcatcccgacaagagaggcgaagatcaggccgagggactgcctgaagaagtgcgcggaggaacaagcctgcctgacgaaggcgaaggcggagcctctaacaacggcagatctatggaacccggcagcagccatagcgccagagttacaggcgtgctggtcatcccatctccagagctggaagaggctgtgctgaggcggaacaagagaaggcctaccaacagcggcagcaagcctctgacaccagctacagtgcctggcacaagaagccctccactgaaccggtacaacagcacaggctctccacctggcaagcctccatccacacaggatgagcacatcaactccggcgatacccctgccgtcagagtgaaggacagaaagcctcctatcggcaccagaagcgtgtccgactgtcctgccaatggcagacctattcaccccggcctggaaaccgacagcaccaagaagggacacagacgggaacacatcatctacgagcgcgacggctacatcgtggacgagagctggtgcaaccctgtgtgcagccggatcagagtgatccctcggagagaactgtgcgtgtgcaagacatgccccaaagtgtgcaagctgtgccgggacgacatccagtgtatgcggcccgatcctttctgcagagagatcttcagaagc

SEQ ID NO: 110 - RNA, 1152 nt, Artificial Sequence
  Codon optimised RNA encoding SeV V protein
auggaccaggacgccuucauccugaaagaggacagcgaggucgagagagaagccccuggcggaagagaaagccuguccgaugugaucggcuuccuggaugccgugcugagcagcgagccuacagauaucggcggcgauagaagcuggcugcacaacaccaucaacaccccucaaggcccuggcucugcccacagagcuaagucugaaggcgagggcgaagugucuaccccuagcacacaggacaacagaagcggcgaggaauccagaguguccggcagaacaagcaagccugaggccgaagcucacgccggcaaucuggacaagcagaacauccacagagccuucggcggcagaaccggcacaaauagcgugucacaggaccucggagauggcggcgauucuggcauccuggaaaacccuccaaacgagcggggcuacccuagaagcggaaucgaggacgagaacagagagauggccgcucaucccgacaagagaggcgaagaucaggccgagggacugccugaagaagugcgcggaggaacaagccugccugacgaaggcgaaggcggagccucuaacaacggcagaucuauggaacccggcagcagccauagcgccagaguuacaggcgugcuggucaucccaucuccagagcuggaagaggcugugcugaggcggaacaagagaaggccuaccaacagcggcagcaagccucugacaccagcuacagugccuggcacaagaagcccuccacugaaccgguacaacagcacaggcucuccaccuggcaagccuccauccacacaggaugagcacaucaacuccggcgauaccccugccgucagagugaaggacagaaagccuccuaucggcaccagaagcguguccgacuguccugccaauggcagaccuauucaccccggccuggaaaccgacagcaccaagaagggacacagacgggaacacaucaucuacgagcgcgacggcuacaucguggacgagagcuggugcaacccugugugcagccggaucagagugaucccucggagagaacugugcgugugcaagacaugccccaaagugugcaagcugugccgggacgacauccaguguaugcggcccgauccuuucugcagagagaucuucagaagc

SEQ ID NO: 111 - protein, 299 aa, Measles virus
MAEEQARHVKNGLECIRALKAEPIGSLAVEEAMAAWSEISDNPGQDRATCKEEEAGSSGLSKPCLSAIGSTEGGAPRIRGQGSGESDDDAETLGIPSRNLQASSTGLQCYHVYDHSGEAVKGIQDADSIMVQSGLDGDSTLSGGDDESENSDVDIGEPDTEGYAITDRGSAPISMGFRASDVETAEGGEIHELLKLQSRGNNFPKLGKTLNVPPPPNPSRASTSETPIKKGHRREIGLIWNGDRVFIDRWCNPMCSKVTLGTIRARCTCGECPRVCEQCRTDTGVDTRIWYHNLPEIPE

SEQ ID NO: 112 - DNA, 897 bp, Measles virus
atggcagaagagcaggcacgccatgtcaaaaacggactggaatgcatccgggctctcaaggccgagcccatcggctcactggccgtcgaggaagccatggcagcatggtcagaaatatcagacaacccaggacaggaccgagccacctgcaaggaagaggaggcaggcagttcgggtctcagcaaaccatgcctctcagcaattggatcaactgaaggcggtgcacctcgcatccgcggtcagggatctggagaaagcgatgacgacgctgaaactttgggaatcccctcaagaaatctccaggcatcaagcactgggttacagtgttatcatgtttatgatcacagcggtgaagcggttaagggaatccaagatgctgactctatcatggttcaatcaggccttgatggtgatagcaccctctcaggaggagacgatgaatctgaaaacagcgatgtggatattggcgaacctgataccgagggatatgctatcactgaccggggatctgctcccatctctatggggttcagggcttctgatgttgaaactgcagaaggaggggagatccacgagctcctgaaactccaatccagaggcaacaactttccgaagcttgggaaaactctcaatgttcctccgcccccgaaccccagtagggccagcacttccgagacacccattaaaaaggggcacagacgcgagattggcctcatttggaacggagatcgcgtctttattgacaggtggtgcaacccaatgtgctcgaaagtcaccctcggaaccatcagggccaggtgcacctgcggggaatgtccccgagtgtgtgagcaatgccgcactgatacaggagtggacacccgaatctggtaccacaatctccccgagatcccagaa

SEQ ID NO: 113 - DNA, 897 bp, Artificial Sequence
  Codon optimised DNA encoding Measles V protein
atggccgaagaacaggccagacacgtgaagaacggcctggaatgcatcagagccctgaaggccgagcctatcggatctctggctgtggaagaagccatggccgcttggagcgagatcagcgataatcccggccaggaccgggccacctgtaaagaagaagaggccggatctagcggcctgagcaagccttgtctgtctgccatcggctctacagaaggcggcgctcctagaatcagaggccaaggatctggcgagagcgacgacgatgctgagacactgggcatccccagcagaaatctgcaggccagctctaccggcctgcagtgctatcacgtgtacgatcactctggcgaggccgtgaagggaatccaggatgccgatagcatcatggtgcagagcggcctggatggcgactctacacttagcggcggagatgacgagagcgagaactccgatgtggacatcggcgagcctgatacagagggctacgccatcacagacagaggcagcgcccctatcagcatgggctttagagccagcgacgtggaaacagccgaaggcggagagattcacgagctgctgaagctgcagagccggggcaacaactttcccaagctgggcaagaccctgaacgtgccacctcctccaaatcctagcagagccagcaccagcgagacacccatcaagaagggccacagaagagagatcggcctgatctggaacggcgaccgggtgttcatcgacagatggtgcaaccccatgtgcagcaaagtgaccctgggcaccatccgggccagatgtacatgcggagagtgccctagagtgtgcgagcagtgcagaaccgataccggcgtggacacccggatctggtatcacaacctgcctgagatccccgag

SEQ ID NO: 114 - RNA, 897 nt, Artificial Sequence
  Codon optimised RNA encoding Measles V protein
auggccgaagaacaggccagacacgugaagaacggccuggaaugcaucagagcccugaaggccgagccuaucggaucucuggcuguggaagaagccauggccgcuuggagcgagaucagcgauaaucccggccaggaccgggccaccuguaaagaagaagaggccggaucuagcggccugagcaagccuugucugucugccaucggcucuacagaaggcggcgcuccuagaaucagaggccaaggaucuggcgagagcgacgacgaugcugagacacugggcauccccagcagaaaucugcaggccagcucuaccggccugcagugcuaucacguguacgaucacucuggcgaggccgugaagggaauccaggaugccgauagcaucauggugcagagcggccuggauggcgacucuacacuuagcggcggagaugacgagagcgagaacuccgauguggacaucggcgagccugauacagagggcuacgccaucacagacagaggcagcgccccuaucagcaugggcuuuagagccagcgacguggaaacagccgaaggcggagagauucacgagcugcugaagcugcagagccggggcaacaacuuucccaagcugggcaagacccugaacgugccaccuccuccaaauccuagcagagccagcaccagcgagacacccaucaagaagggccacagaagagagaucggccugaucuggaacggcgaccggguguucaucgacagauggugcaaccccaugugcagcaaagugacccugggcaccauccgggccagauguacaugcggagagugcccuagagugugcgagcagugcagaaccgauaccggcguggacacccggaucugguaucacaaccugccugagauccccgag

SEQ ID NO: 115 - protein, 456 aa, Nipah Virus
MDKLELVNDGLNIIDFIQKNQKEIQKTYGRSSIQQPSIKDQTKAWEDFLQCTSGESEQVEGGMSKDDGDVERRNLEDLSSTSPTDGTIGKRVSNTRDWAEGSDDIQLDPVVTDVVYHDHGGECTGYGFTSSPERGWSDYTSGANNGNVCLVSDAKMLSYAPEIAVSKEDRETDLVHLENKLSTTGLNPTAVPFTLRNLSDPAKDSPVIAEHYYGLGVKEQNVGPQTSRNVNLDSIKLYTSDDEEADQLEFEDEFAGSSSEVIVGISPEDEEPSSVGGKPNESIGRTIEGQSIRDNLQAKDNKSTDVPGAGPKDSAVKEEPPQKRLPMLAEEFECSGSEDPIIRELLKENSLINCQQGKDAQPPYHWSIERSISPDKTEIVNGAVQTADRQRPGTPMPKSRGIPIKKGHRREISICWDGKRAWVEEWCNPACSRITPLPRRQECQCGECPTECFHCG

SEQ ID NO: 116 - DNA, 1368 bp, Nipah Virus
atggataaattggaactagtcaatgatggcctcaatattattgactttattcagaagaaccaaaaagaaatacagaagacatacggacgatcaagtattcaacaacccagcatcaaagatcaaacaaaagcctgggaagattttctgcagtgcaccagtggagaatctgaacaagttgaggggggaatgtctaaggatgatggagatgttgaaagaagaaacttggaggatctatccagtacttctcccacagatggaactattggaaagagagtgtcgaacacccgtgactgggcagaaggttcagatgacatacaactggacccagtggttacagacgttgtataccatgatcatggaggagaatgtaccggatatggatttacttcaagccctgagagagggtggagtgattacacatcaggagcaaacaatgggaatgtatgtcttgtatctgatgcaaagatgctgtcctatgctcccgaaattgcagtttctaaagaagatcgggaaactgatctagttcatcttgagaataaactatctactacaggactgaatcccacagcagtaccgttcactctgagaaacctgtctgatcctgcaaaagactctcctgtgattgctgaacactactacggactaggagttaaagagcaaaacgttggccctcagactagcagaaatgtcaatttggacagcatcaaattgtacacatcagatgacgaagaggcagatcagcttgaattcgaagatgagtttgcaggaagctcaagtgaagtgatagtcggcatttctcctgaagatgaagagccttcaagtgttggcggaaaacccaatgaatccattggacgtacaatcgaaggccaatcaatccgagacaaccttcaagccaaggacaacaaatcaacagatgtaccaggagcaggaccgaaagattcagcagtgaaggaagaaccaccccagaagaggctacctatgttagctgaagaatttgagtgctctggatcggaagacccaatcattcgggagctgctgaaggagaactcactcataaattgtcagcaagggaaagatgctcagcctccatatcattggagcatcgagaggtcaataagcccggataaaactgagatcgtcaacggtgctgtgcaaactgctgacaggcaaagaccaggaactccgatgccaaagtcccgaggtattcccattaaaaaggggcacagacgcgaaatatccatctgctgggacggaaaacgtgcctgggtcgaagagtggtgcaacccggcatgttcgaggatcacccccctaccaagaaggcaagagtgtcaatgcggagaatgtccaactgaatgcttccactgcggt

SEQ ID NO: 117 - DNA, 1368 bp, Artificial Sequence
  Codon optimised DNA encoding NiV V protein
atggacaagctggaactggtcaacgacggcctgaacatcatcgacttcatccagaagaaccagaaagagatccagaaaacctacggccggtccagcatccagcagcctagcatcaaggatcagaccaaggcctgggaagatttcctgcagtgtaccagcggcgagagcgaacaggttgaaggcggcatgagcaaggacgacggcgacgtggaaagacggaacctggaagatctgagcagcacaagccctaccgatggcaccatcggcaagcgggtgtccaacacaagagattgggccgagggcagcgacgacattcagctggatcctgtggtcaccgatgtggtgtaccacgatcacggcggcgagtgtacaggctacggctttacaagcagccccgagagaggctggagcgattatacaagcggcgccaacaacggcaacgtgtgcctggtgtctgacgccaagatgctgagctacgcccctgagatcgccgtgtccaaagaggacagagaaaccgacctggtgcacctggaaaacaagctgagcaccaccggactgaaccctaccgccgtgcctttcacactgagaaacctgagcgaccccgccaaggactctcctgtgattgccgagcactactacggcctgggcgtgaaagaacagaacgtgggccctcagaccagccggaacgtgaacctggattccatcaagctgtacacctccgacgacgaggaagccgaccagctggaattcgaggatgagtttgccggcagcagcagcgaagtgattgtgggcatcagccctgaggacgaggaacctagctctgttggcggcaagcccaatgagagcatcggcagaacaatcgagggccagagcatccgggataacctgcaggccaaggacaacaagagcaccgatgttccaggcgctggccctaaggatagcgccgtgaaagaggaaccacctcagaaacggctgcccatgctggccgaggaatttgagtgtagcggcagcgaggaccccatcatcagagagctgctgaaagagaacagcctgatcaactgccagcagggcaaagacgcccagcctccttaccactggtccatcgagagatctatcagccccgacaagaccgagatcgtgaatggcgctgtgcagaccgccgatagacagaggcctggaactcccatgcctaagagcagaggcatccccatcaagaagggccacagaagagagatcagcatctgctgggacggcaagcgcgcctgggttgaagagtggtgtaatcccgcctgcagccggatcacacctctgcctagaaggcaagagtgccagtgtggcgagtgtcccaccgagtgttttcactgtgga

SEQ ID NO: 118 - RNA, 1368 nt, Artificial Sequence
  Codon optimised RNA encoding NiV V protein
auggacaagcuggaacuggucaacgacggccugaacaucaucgacuucauccagaagaaccagaaagagauccagaaaaccuacggccgguccagcauccagcagccuagcaucaaggaucagaccaaggccugggaagauuuccugcaguguaccagcggcgagagcgaacagguugaaggcggcaugagcaaggacgacggcgacguggaaagacggaaccuggaagaucugagcagcacaagcccuaccgauggcaccaucggcaagcggguguccaacacaagagauugggccgagggcagcgacgacauucagcuggauccuguggucaccgaugugguguaccacgaucacggcggcgaguguacaggcuacggcuuuacaagcagccccgagagaggcuggagcgauuauacaagcggcgccaacaacggcaacgugugccuggugucugacgccaagaugcugagcuacgccccugagaucgccguguccaaagaggacagagaaaccgaccuggugcaccuggaaaacaagcugagcaccaccggacugaacccuaccgccgugccuuucacacugagaaaccugagcgaccccgccaaggacucuccugugauugccgagcacuacuacggccugggcgugaaagaacagaacgugggcccucagaccagccggaacgugaaccuggauuccaucaagcuguacaccuccgacgacgaggaagccgaccagcuggaauucgaggaugaguuugccggcagcagcagcgaagugauugugggcaucagcccugaggacgaggaaccuagcucuguuggcggcaagcccaaugagagcaucggcagaacaaucgagggccagagcauccgggauaaccugcaggccaaggacaacaagagcaccgauguuccaggcgcuggcccuaaggauagcgccgugaaagaggaaccaccucagaaacggcugcccaugcuggccgaggaauuugaguguagcggcagcgaggaccccaucaucagagagcugcugaaagagaacagccugaucaacugccagcagggcaaagacgcccagccuccuuaccacugguccaucgagagaucuaucagccccgacaagaccgagaucgugaauggcgcugugcagaccgccgauagacagaggccuggaacucccaugccuaagagcagaggcauccccaucaagaagggccacagaagagagaucagcaucugcugggacggcaagcgcgccuggguugaagagugguguaaucccgccugcagccggaucacaccucugccuagaaggcaagagugccaguguggcgagugucccaccgaguguuuucacugugga

SEQ ID NO: 119 - protein, 318 aa, Encephalomyocarditis virus
LKARDINDIFAILKNGEWLVKLILAIRDWIKAWIASEEKFVTMTDLVPGILEKQRDLNDPSKYKEAKEWLDNARQACLKSGNVHIANLCKVVAPAPSKSRPEPVVVCLRGKSGQGKSFLANVLAQAISTHFTGRIDSVWYCPPDPDHFDGYNQQTVVVMDDLGQNPDGKDFKYFAQMVSTTGFIPPMASLEDKGKPFNSKVIIATTNLYSGFTPRTMVCPDALNRRFHFDIDVSAKDGYKINSKLDIIKALEDTHANPVAMFQYDCALLNGMAVEMKRMQQDMFKPQPPLQNVYQLVQEVIDRVELHEKVSSHPIFKQ

SEQ ID NO: 120 - DNA, 954 bp, Encephalomyocarditis virus
ctcaaagcacgtgacatcaacgacatcttcgccattctcaagaacggcgagtggctggtcaaactgatccttgccatccgcgactggattaaggcttggatcgcctcagaagagaagtttgtcaccatgacagacttggtgcctggcatccttgaaaagcagcgggacctgaacgacccgagcaagtacaaggaagccaaggagtggctcgacaacgcgcgccaagcgtgtttgaagagcgggaacgtccacattgccaacctgtgcaaagtggtcgcaccagcacccagcaagtcgaggcccgaacccgtggttgtttgcctccgcggcaaatctggccagggcaagagcttccttgcaaacgtgcttgcacaggcaatttccacccacttcaccggcagaatcgactcagtgtggtactgcccacctgaccctgaccacttcgacggttacaaccagcaaaccgttgttgtgatggatgatttgggccagaaccctgacggcaaggacttcaaatactttgcccaaatggtctcgaccacagggtttatcccgcccatggcatcactcgaggacaaaggtaaacctttcaacagcaaagtcatcatcgcgaccaccaacttgtactcgggcttcaccccgaggaccatggtatgtcccgacgcactgaaccggaggtttcactttgacatcgatgtgagtgctaaggatgggtacaaaattaacagcaaattggacattatcaaagcactcgaagacacccacgccaacccagtggcaatgtttcaatacgactgtgcccttctcaacggcatggccgttgaaatgaagagaatgcaacaagacatgttcaagcctcaaccacccctccagaatgtgtaccagcttgttcaggaggtgatcgatcgggtcgagctccacgagaaagtgtcgagtcacccgatcttcaagcag

SEQ ID NO: 121 - DNA, 954 bp, Artificial Sequence
  Codon optimised DNA encoding EMCV protein
ctgaaggccagagacatcaacgacatcttcgccatcctgaagaacggcgagtggctggtcaagctgatcctggccatcagagactggatcaaggcctggatcgccagcgaagagaagttcgtgaccatgaccgatctggtgcccggcatcctggaaaagcagagggacctgaacgaccccagcaagtacaaagaggccaaagaatggctggacaacgccagacaggcctgcctgaagtccggcaatgtgcatatcgccaacctgtgcaaggtggtggcccctgctcctagcaagtctagacctgagcctgtggtcgtgtgcctgagaggcaaatctggccagggcaagagcttcctggccaatgttctggcccaggccatcagcacccacttcaccggaagaatcgacagcgtgtggtactgccctcctgatcctgaccacttcgacggctacaaccagcagaccgtggtggtcatggacgacctgggacagaaccccgacggcaaggacttcaagtacttcgcccagatggtgtccaccaccggcttcattcctccaatggccagcctggaagataagggcaagcccttcaacagcaaagtgatcattgccaccaccaacctgtacagcggcttcacccctagaaccatggtctgccccgacgctctgaacagacggttccactttgacatcgacgtgtccgccaaggatggctacaagatcaactccaagctggacatcatcaaggccctcgaggacacccacgccaatcctgtggccatgttccagtacgattgcgccctgctgaatggcatggccgtggaaatgaagcggatgcagcaggacatgttcaagccccagcctccactgcagaacgtgtaccagctcgtgcaagaagtgatcgaccgggtcgagctgcacgagaaggtgtcctctcatcccatcttcaagcag

SEQ ID NO: 122 - RNA, 954 nt, Artificial Sequence
  Codon optimised RNA encoding EMCV protein
cugaaggccagagacaucaacgacaucuucgccauccugaagaacggcgaguggcuggucaagcugauccuggccaucagagacuggaucaaggccuggaucgccagcgaagagaaguucgugaccaugaccgaucuggugcccggcauccuggaaaagcagagggaccugaacgaccccagcaaguacaaagaggccaaagaauggcuggacaacgccagacaggccugccugaaguccggcaaugugcauaucgccaaccugugcaaggugguggccccugcuccuagcaagucuagaccugagccuguggucgugugccugagaggcaaaucuggccagggcaagagcuuccuggccaauguucuggcccaggccaucagcacccacuucaccggaagaaucgacagcgugugguacugcccuccugauccugaccacuucgacggcuacaaccagcagaccgugguggucauggacgaccugggacagaaccccgacggcaaggacuucaaguacuucgcccagaugguguccaccaccggcuucauuccuccaauggccagccuggaagauaagggcaagcccuucaacagcaaagugaucauugccaccaccaaccuguacagcggcuucaccccuagaaccauggucugccccgacgcucugaacagacgguuccacuuugacaucgacguguccgccaaggauggcuacaagaucaacuccaagcuggacaucaucaaggcccucgaggacacccacgccaauccuguggccauguuccaguacgauugcgcccugcugaauggcauggccguggaaaugaagcggaugcagcaggacauguucaagccccagccuccacugcagaacguguaccagcucgugcaagaagugaucgaccgggucgagcugcacgagaagguguccucucaucccaucuucaagcag

SEQ ID NO: 123 - protein, 257 aa, Avian infectious bursal disease virus
ASEFKETPELESAVRAMEAAANVDPLFQSALSVFMWLEENGIVTDMANFALSDPNAHRMRNFLANAPQAGSKSQRAKYGTAGYGVEARGPTPEEAQREKDTRISKKMETMGIYFATPEWVALNGHRGPSPGQLKYWQNTREIPDPNEDYLDYVHAEKSRLASEEQILRAATSIYGAPGQAEPPQAFIDEVAKVYEINHGRGPNQEQMKDLLLTAMEMKHRNPRRALPKPKPKPNAPTQRPPGRLGRWIRTVSDEDLE

SEQ ID NO: 124 - DNA, 771 bp, Avian infectious bursal disease virus
gcatcagagttcaaagagacccccgaactcgagagtgccgtcagagcaatggaagcagcagccaacgtggacccactattccaatctgcactcagtgtgttcatgtggctggaagagaatgggattgtgactgacatggccaacttcgcactcagcgacccgaacgcccatcggatgcgaaattttcttgcaaacgcaccacaagcaggcagcaagtcgcaaagggccaagtacgggacagcaggctacggagtggaggctcggggccccacaccagaggaagcacagagggaaaaagacacacggatctcaaagaagatggagaccatgggcatctactttgcaacaccagaatgggtagcactcaatgggcaccgagggccaagccccggccagctaaagtactggcagaacacacgagaaataccggacccaaacgaggactatctagactacgtgcatgcagagaagagccggttggcatcagaagaacaaatcctaagggcagctacgtcgatctacggggctccaggacaggcagagccaccccaagctttcatagacgaagttgccaaagtctatgaaatcaaccatggacgtggcccaaaccaagaacagatgaaagatctgctcttgactgcgatggagatgaagcatcgcaatcccaggcgggctctaccaaagcccaagccaaaacccaatgctccaacacagagaccccctggtcggctgggccgctggatcaggaccgtctctgatgaggaccttgag

SEQ ID NO: 125 - DNA, 771 bp, Artificial Sequence
  Codon optimised DNA encoding Birnavirus VP3 protein
gccagcgagttcaaagagacacccgagctggaaagcgccgtcagagctatggaagccgccgctaatgtggaccctctgtttcagtctgccctgagcgtgttcatgtggctggaagagaacggcatcgtgaccgacatggccaacttcgccctgtctgaccccaacgctcaccggatgagaaactttctggccaacgctcctcaggccggcagcaagtctcagagagccaaatacggcacagccggctacggcgtggaagccagaggacctacacctgaggaagcccagagagagaaggacacccggatcagcaagaaaatggaaaccatgggcatctacttcgccacacctgagtgggtcgccctgaatggacacagaggaccatctccaggccagctgaagtactggcagaacaccagagagatccccgatcctaacgaggactacctggactacgtgcacgccgagaaaagcagactggccagcgaggaacagatcctgagagccgccacatccatctatggcgctccaggacaagccgaacctccacaggcctttatcgacgaggtggccaaggtgtacgagatcaaccacggcagaggccccaatcaagagcagatgaaggacctgctgctgaccgccatggaaatgaagcacagaaaccccagacgggccctgcctaagccaaagcctaaacctaacgctcccacacagcggcctccaggcagactcggaagatggatcagaaccgtgtccgacgaggacctggaa

SEQ ID NO: 126 - RNA, 771 nt, Artificial Sequence
  Codon optimised RNA encoding Birnavirus VP3 protein
gccagcgaguucaaagagacacccgagcuggaaagcgccgucagagcuauggaagccgccgcuaauguggacccucuguuucagucugcccugagcguguucauguggcuggaagagaacggcaucgugaccgacauggccaacuucgcccugucugaccccaacgcucaccggaugagaaacuuucuggccaacgcuccucaggccggcagcaagucucagagagccaaauacggcacagccggcuacggcguggaagccagaggaccuacaccugaggaagcccagagagagaaggacacccggaucagcaagaaaauggaaaccaugggcaucuacuucgccacaccugagugggucgcccugaauggacacagaggaccaucuccaggccagcugaaguacuggcagaacaccagagagauccccgauccuaacgaggacuaccuggacuacgugcacgccgagaaaagcagacuggccagcgaggaacagauccugagagccgccacauccaucuauggcgcuccaggacaagccgaaccuccacaggccuuuaucgacgagguggccaagguguacgagaucaaccacggcagaggccccaaucaagagcagaugaaggaccugcugcugaccgccauggaaaugaagcacagaaaccccagacgggcccugccuaagccaaagccuaaaccuaacgcucccacacagcggccuccaggcagacucggaagauggaucagaaccguguccgacgaggaccuggaa

SEQ ID NO: 127 - protein, 94 aa, Porcine delta coronavirus
MCNCHLQLRDLYRLCNKLHIRRDDVPELIDPLVKTRCFAYSLVVLANANPIAFSILPRKILINGEPLLLEYGSIYGKDFIIRPSLQVILEDELN

SEQ ID NO: 128 - DNA, 282 bp, Porcine delta coronavirus
atgtgcaactgccatctgcagctgcgagatttatatagattgtgcaataagctgcacatcagaagagacgatgttcctgagcttattgaccctctcgttaaaactcgctgttttgcttacagtctcgtggttcttgctaatgctaatccaattgcatttagcatactacctcggaaaattcttatcaatggtgagcctttactgcttgaatatggtagcatatatggtaaagactttatcattagaccatcgctccaagtcattcttgaagatgaattaaat

SEQ ID NO: 129 - DNA, 285 bp, Artificial Sequence
  Codon optimised DNA encoding Porcine delta coronavirus NS6 protein
atgtgcaactgccatctgcagctgcgggacctgtaccggctgtgtaacaagctgcacatcagacgggacgacgtgcccgagctgatcgatcctctggtcaagaccagatgcttcgcctacagcctggtggtgctggccaacgccaatcctatcgccttcagcatcctgcctcggaagatcctgatcaacggcgagcctctgctgctggaatacggcagcatctacggcaaggacttcatcatcagacccagcctgcaagtgatcctggaagatgagctgaactga

SEQ ID NO: 130 - RNA, 285 nt, Artificial Sequence
  Codon optimised RNA sequence encoding Porcine delta coronavirus NS6 protein
augugcaacugccaucugcagcugcgggaccuguaccggcuguguaacaagcugcacaucagacgggacgacgugcccgagcugaucgauccucuggucaagaccagaugcuucgccuacagccugguggugcuggccaacgccaauccuaucgccuucagcauccugccucggaagauccugaucaacggcgagccucugcugcuggaauacggcagcaucuacggcaaggacuucaucaucagacccagccugcaagugauccuggaagaugagcugaacuga

SEQ ID NO: 131 - protein, 99 aa, Lassa virus
MGNKQAKAPESKDSPRASLIPDATHLGPQFCKSCWFENKGLVECNNHYLCLNCLTLLLSVSNRCPICKMPLPTKLRPSAAPTAPPTGAADSIRPPPYSP

SEQ ID NO: 132 - DNA, 297 bp, Lassa virus
atgggaaacaagcaagccaaagccccagaatcaaaagacagtccgagagccagcctgatcccagatgccacacatctagggccacagttctgtaagagctgctggttcgaaaacaagggcctggttgagtgcaacaaccactatctgtgtctcaactgcctcaccttacttctaagtgtcagcaacaggtgtcccatttgcaagatgcctctccccacaaaactgagaccatcagccgctccaacagcacctccaaccggagcagcggacagcatcagacccccaccctacagtccc

SEQ ID NO: 133 - DNA, 297 bp, Artificial Sequence
  Codon optimised DNA encoding LASV Z protein
atgggcaacaagcaggccaaggctcccgagagcaaggatagccctagagcctctctgatccccgacgccacacatctgggaccccagttctgcaagagctgttggttcgagaacaaaggcctggtggaatgcaacaaccactacctgtgcctgaactgtctgaccctgctgctgagcgtgtccaacagatgccccatctgcaagatgcccctgcctaccaagctgaggccttctgctgctcctacagctcctccaacaggcgccgctgatagcatcagacctccaccttatagcccc

SEQ ID NO: 134 - RNA, 297 nt, Artificial Sequence
  Codon optimised RNA encoding LASV Z protein
augggcaacaagcaggccaaggcucccgagagcaaggauagcccuagagccucucugauccccgacgccacacaucugggaccccaguucugcaagagcuguugguucgagaacaaaggccugguggaaugcaacaaccacuaccugugccugaacugucugacccugcugcugagcguguccaacagaugccccaucugcaagaugccccugccuaccaagcugaggccuucugcugcuccuacagcuccuccaacaggcgccgcugauagcaucagaccuccaccuuauagcccc

SEQ ID NO: 135 - protein, 90 aa, Dandenong virus
MGQAKSKETKLSKKEDRAEVLPDATYLGPLNCKSCWQRFDSLVRCHDHYLCRQCLNLLLTVSDRCPLCKHPLPTKLRVSTAPSSPPPYEE

SEQ ID NO: 136 - DNA, 270 bp, Dandenong virus
atgggtcaagcaaaatccaaagaaacaaagctctccaagaaagaggacagagcagaggttctacctgacgcaacctatcttggtcctctgaactgcaaatcatgctggcaaaggttcgacagtttggttaggtgccatgaccactacctatgcaggcaatgtctgaaccttttgttgacagtctcagacagatgccctctctgcaaacaccctctaccgaccaagctgagggtgtcgacagcccccagctcacctcccccctacgaggag

SEQ ID NO: 137 - DNA, 270 bp, Artificial Sequence
  Codon optimised DNA encoding DANV Z protein
atgggccaagccaagagcaaagagacaaagctgagcaagaaagaggaccgcgccgaggttctgcccgatgccacatatctgggccctctgaactgcaagagctgctggcagagattcgacagcctcgtgcggtgccacgatcactacctgtgcagacagtgcctgaacctgctgctgaccgtgtccgatagatgccctctgtgcaagcaccctctgcctaccaagctgagagtgtccaccgctcctagcagccctccaccttatgaggaa

SEQ ID NO: 138 - RNA, 270 nt, Artificial Sequence
  Codon optimised RNA encoding DANV Z protein
augggccaagccaagagcaaagagacaaagcugagcaagaaagaggaccgcgccgagguucugcccgaugccacauaucugggcccucugaacugcaagagcugcuggcagagauucgacagccucgugcggugccacgaucacuaccugugcagacagugccugaaccugcugcugaccguguccgauagaugcccucugugcaagcacccucugccuaccaagcugagaguguccaccgcuccuagcagcccuccaccuuaugaggaa

SEQ ID NO: 139 - protein, 90 aa, Lymphocytic choriomeningitis virus
MGQGKSREEKGTNSTNRAEILPDTTYLGPLSCKSCWQKFDSLVRCHDHYLCRHCLNLLLSVSDRCPLCKYPLPTRLKISTAPSSPPPYEE

SEQ ID NO: 140 - DNA, 270 bp, Lymphocytic choriomeningitis virus
atgggtcaaggcaagtccagagaggagaaaggcaccaatagtacaaacagggccgaaatcctaccagataccacctatcttggccctttaagctgcaaatcttgctggcagaaatttgacagcttggtaagatgccatgaccactacctttgcaggcactgtttaaaccttctgctgtcagtatccgacaggtgtcctctttgtaaatatccattaccaaccagattgaagatatcaacagccccaagctctccacctccctacgaagag

SEQ ID NO: 141 - DNA, 270 bp, Artificial Sequence
  Codon optimised DNA encoding LCMV Z protein
atgggccagggcaagtccagagaggaaaagggcaccaactccaccaaccgggccgagatcctgcctgacaccacatatctgggccctctgagctgcaagagctgctggcagaaattcgacagcctcgtgcggtgccacgaccactacctgtgtagacactgcctgaacctgctgctgagcgtgtccgatagatgccctctgtgcaagtaccctctgcctaccagactgaagatcagcacagcccctagcagccctccaccttacgaagaa

SEQ ID NO: 142 - RNA, 270 nt, Artificial Sequence
  Codon optimised RNA encoding LCMV Z protein
augggccagggcaaguccagagaggaaaagggcaccaacuccaccaaccgggccgagauccugccugacaccacauaucugggcccucugagcugcaagagcugcuggcagaaauucgacagccucgugcggugccacgaccacuaccuguguagacacugccugaaccugcugcugagcguguccgauagaugcccucugugcaaguacccucugccuaccagacugaagaucagcacagccccuagcagcccuccaccuuacgaagaa

SEQ ID NO: 143 - protein, 95 aa, Lujo mammarenavirus
MGQRHSSGSGQPNPKPSDSDHEARRSELHSDASHLGPLNCKSCWKSKKALVKCYDHYLCLNCLSLLMGITPRCPFCYRELPKNLDLAEAPSAPPL

SEQ ID NO: 144 - DNA, 285 bp, Lujo mammarenavirus
atgggtcagagacattcctctggctccggccaacccaaccccaagccgagtgacagcgatcatgaagcgagaaggtcagagcttcactcggacgcctcccatctcggacctctgaactgcaaatcttgctggaagtcaaagaaggcactggtgaagtgctatgatcactacctctgtctaaactgcttaagccttctaatgggcatcaccccaagatgtcccttctgttacagagagctacccaaaaatctggaccttgcagaggcaccaagcgcaccacccctc

SEQ ID NO: 145 - DNA, 285 bp, Artificial Sequence
  Codon optimised DNA encoding LUJV Z protein
atgggccagagacacagctctggaagcggccagcctaatcctaagcctagcgacagcgatcacgaggccagaagaagcgagctgcactccgatgcctctcacctgggacctctgaactgcaagagctgctggaagtccaagaaagccctggtcaagtgctacgaccactacctgtgcctgaactgcctgagcctgctgatgggcattacccctagatgccccttctgctacagagagctgcccaagaacctggacctggccgaagctccttctgctcctcctctg

SEQ ID NO: 146 - RNA, 285 nt, Artificial Sequence
  Codon optimised RNA encoding LUJV Z protein
augggccagagacacagcucuggaagcggccagccuaauccuaagccuagcgacagcgaucacgaggccagaagaagcgagcugcacuccgaugccucucaccugggaccucugaacugcaagagcugcuggaaguccaagaaagcccuggucaagugcuacgaccacuaccugugccugaacugccugagccugcugaugggcauuaccccuagaugccccuucugcuacagagagcugcccaagaaccuggaccuggccgaagcuccuucugcuccuccucug

SEQ ID NO: 147 - protein, 98 aa, Chapare mammarenavirus
MGNTKTKDRQYQSNSSQPTNTSAPVLLRRQAEPSLYGRHNCRCCWFADTNLVNCSNHYLCLKCLNTMLRRSNLCDICGEELPTTIIVPVEPSAPLPGQ

SEQ ID NO: 148 - DNA, 294 bp, Chapare mammarenavirus
atgggtaacaccaaaacaaaggacagacagtatcaatcgaactcaagccaacccacaaacacatctgcaccagttctgctgagaaggcaggcagaaccaagtctgtatgggagacacaactgcagatgctgttggtttgcagacacaaacctagtcaattgttccaaccactacctttgccttaaatgtctgaacacaatgttaagaagatccaatctctgtgacatatgcggtgaagaacttcccacaacaatcattgttccagtggaaccatcagcaccactgcccggacaa

SEQ ID NO: 149 - DNA, 294 bp, Artificial Sequence
  Codon optimised DNA encoding CHPV Z protein
atgggcaacaccaagaccaaggaccggcagtaccagagcaacagcagccagcctaccaacacatctgcccctgtgctgctgagaaggcaggccgagccttctctgtacggcagacacaactgccggtgctgttggttcgccgacaccaacctggtcaactgcagcaaccactacctgtgcctgaagtgtctgaacaccatgctgcggcggagcaacctgtgcgatatctgtggcgaggaactgcccaccaccatcatcgtgcctgtggaaccttctgctcctctgcctggacag

SEQ ID NO: 150 - RNA, 294 nt, Artificial Sequence
  Codon optimised RNA encoding CHPV Z protein
augggcaacaccaagaccaaggaccggcaguaccagagcaacagcagccagccuaccaacacaucugccccugugcugcugagaaggcaggccgagccuucucuguacggcagacacaacugccggugcuguugguucgccgacaccaaccuggucaacugcagcaaccacuaccugugccugaagugucugaacaccaugcugcggcggagcaaccugugcgauaucuguggcgaggaacugcccaccaccaucaucgugccuguggaaccuucugcuccucugccuggacag

SEQ ID NO: 151 - protein, 94 aa, Machupo virus
MGNCNKPPKRPPNTQTSAAQPSAEFRRTALPSLYGRYNCKCCWFADTNLITCNDHYLCLRCHQTMLRNSELCHICWKPLPTSITVPVEPSAPPP

SEQ ID NO: 152 - DNA, 282 bp, Machupo virus
atgggcaactgtaacaagcctcccaagaggcctcccaacacacaaacatcagccgcccagccctcagcagagttcaggagaacagccctacccagtctctatggtcgctacaactgcaaatgttgttggtttgccgacacaaacttgattacatgtaacgaccactacttgtgtctgagatgtcatcaaacaatgctcaggaattctgaactctgtcacatatgctggaaaccactaccgacatccatcacagtccccgtggagccaagcgcccccccacca

SEQ ID NO: 153 - DNA, 282 bp, Artificial Sequence
  Codon optimised DNA encoding MACV Z protein
atgggcaactgcaacaagcctcctaagcggcctcctaacacacagacatctgccgctcagcctagcgccgagttcagaagaacagccctgcctagcctgtacggccggtacaactgcaagtgctgttggttcgccgacaccaacctgatcacctgtaacgaccactacctgtgcctgcggtgccaccagaccatgctgagaaatagcgagctgtgccacatctgctggaagcccctgcctaccagcatcaccgtgcctgtggaaccttctgctcctcctcct

SEQ ID NO: 154 - RNA, 282 nt, Artificial Sequence
  Codon optimised RNA encoding MACV Z protein
augggcaacugcaacaagccuccuaagcggccuccuaacacacagacaucugccgcucagccuagcgccgaguucagaagaacagcccugccuagccuguacggccgguacaacugcaagugcuguugguucgccgacaccaaccugaucaccuguaacgaccacuaccugugccugcggugccaccagaccaugcugagaaauagcgagcugugccacaucugcuggaagccccugccuaccagcaucaccgugccuguggaaccuucugcuccuccuccu

SEQ ID NO: 155 - protein, 95 aa, Guanarito virus
MGNSKSKSNPSSSSESQKGAPTVTEFRRTAIHSLYGRYNCKCCWFADKNLIKCSDHYLCLRCLNVMLKNSDLCNICWEQLPTCITVPEEPSAPPE

SEQ ID NO: 156 - DNA, 285 bp, Guanarito virus
atgggcaattcaaaatctaaatccaacccatccagttcctcagagtctcaaaaaggggcaccaacagtcacagaatttaggaggactgccattcacagtctctatgggaggtacaactgcaagtgttgctggtttgctgacaagaatctgattaaatgctctgatcattacctctgcttgaggtgtttaaatgtcatgctgaaaaactctgatctttgcaacatttgttgggagcagctgcccacatgcatcacagttccggaggagccaagcgctccaccggaa

SEQ ID NO: 157 - DNA, 285 bp, Artificial Sequence
  Codon optimised DNA encoding GTOV Z protein
atgggcaacagcaagtccaagagcaaccccagcagcagctccgagtctcagaaaggcgctcctaccgtgaccgagttcagaagaacagccatccacagcctgtacggccggtacaactgcaagtgctgttggttcgccgacaagaacctgatcaagtgcagcgaccactacctgtgcctgcggtgcctgaacgtgatgctgaagaactccgacctgtgcaacatctgctgggagcagctgcctacctgcatcaccgtgcctgaggaaccttctgctcctcctgaa

SEQ ID NO: 158 - RNA, 285 nt, Artificial Sequence
  Codon optimised RNA encoding GTOV Z protein
augggcaacagcaaguccaagagcaaccccagcagcagcuccgagucucagaaaggcgcuccuaccgugaccgaguucagaagaacagccauccacagccuguacggccgguacaacugcaagugcuguugguucgccgacaagaaccugaucaagugcagcgaccacuaccugugccugcggugccugaacgugaugcugaagaacuccgaccugugcaacaucugcugggagcagcugccuaccugcaucaccgugccugaggaaccuucugcuccuccugaa

SEQ ID NO: 159 - protein, 94 aa, Junin virus
MGNCNGASKSNQPDSSRVTQPAAEFRRVAHSSLYGRYNCKCCWFADTNLITCNDHYLCLRCHQVMLRNSDLCNICWKPLPTTITVPVEPTAPPP

SEQ ID NO: 160 - DNA, 282 bp, Junin virus
atgggcaactgcaacggggcatccaagtcaaaccagccagactcttcaagggtcacacagccagccgcagaattcaggagggtggctcacagcagtctatatggtagatacaactgcaagtgctgctggtttgctgacaccaatctgataacctgcaatgatcactacctttgtttaaggtgccatcaggttatgttaaggaattcggacctctgcaatatctgttggaagcccctacctaccacaatcacagtgccggtggagccaacagcaccaccacca

SEQ ID NO: 161 - DNA, 282 bp, Artificial Sequence
  Codon otpimised DNA encoding JUNV Z protein
atgggcaattgcaacggcgccagcaagagcaaccagcctgatagcagcagagtgacacagcctgccgccgagtttagaagagtggcccacagcagcctgtacggccggtacaattgcaagtgctgttggttcgccgacaccaacctgatcacctgtaacgaccactacctgtgcctgcggtgccaccaagtgatgctgagaaacagcgacctgtgcaacatctgctggaagcccctgcctaccaccatcaccgtgcctgtggaacctacagctcctcctcct

SEQ ID NO: 162 - RNA, 282 nt, Artificial Sequence
  Codon optimised RNA encoding JUNV Z protein
augggcaauugcaacggcgccagcaagagcaaccagccugauagcagcagagugacacagccugccgccgaguuuagaagaguggcccacagcagccuguacggccgguacaauugcaagugcuguugguucgccgacaccaaccugaucaccuguaacgaccacuaccugugccugcggugccaccaagugaugcugagaaacagcgaccugugcaacaucugcuggaagccccugccuaccaccaucaccgugccuguggaaccuacagcuccuccuccu

SEQ ID NO: 163 - protein, 100 aa, Sabia virus
MGNSKSKSKLSANQYEQQTVNSTKQVAILKRQAEPSLYGRHNCRCCWFANTNLIKCSDHYICLKCLNIMLGKSSFCDICGEELPTSIVVPIEPSAPPPED

SEQ ID NO: 164 - DNA, 300 bp, Sabia virus
atgggtaactccaagtcaaaatcaaagctgtctgctaaccagtatgaacagcaaacagtcaatagcaccaaacaggtagccattttaaagagacaggctgaacctagtctgtatggaagacacaactgcaggtgctgctggttcgccaatacaaatctaataaaatgttccgaccattatatttgtctaaaatgtttgaacataatgttggggaagtcttctttttgtgacatttgtggtgaagagctccccacatccattgtggtgcccatcgaaccaagtgctccacctccagaagac

SEQ ID NO: 165 - DNA, 300 bp, Artificial Sequence
  Codon optimised DNA encoding SABV Z protein
atgggcaacagcaagagcaagtccaagctgagcgccaaccagtacgagcagcagaccgtgaacagcaccaaacaggtggccatcctgaagagacaggccgagcctagcctgtacggcagacacaactgccggtgttgttggttcgccaacaccaacctgatcaagtgcagcgaccactacatctgcctgaagtgcctgaacatcatgctgggcaagagcagcttctgcgacatctgcggagaggaactgcccacctctatcgtggtgcctatcgagccttctgctcctccacctgaggat

SEQ ID NO: 166 - RNA, 300 nt, Artificial Sequence
  Codon optimised RNA encoding SABV Z protein
augggcaacagcaagagcaaguccaagcugagcgccaaccaguacgagcagcagaccgugaacagcaccaaacagguggccauccugaagagacaggccgagccuagccuguacggcagacacaacugccgguguuguugguucgccaacaccaaccugaucaagugcagcgaccacuacaucugccugaagugccugaacaucaugcugggcaagagcagcuucugcgacaucugcggagaggaacugcccaccucuaucguggugccuaucgagccuucugcuccuccaccugaggau

SEQ ID NO: 167 - protein, 183 aa, Coxsackievirus
GPSLDFALSLLRRNIRQVQTDQGHFTMLGVRDRLAILPRHSQPGKTIWVEHKLINVLDAVELVDEQGVNLELTLVTLDTNEKFRDVTKFIPETITGASDATLVINTEHMPSMFVPVGDVVQYGFLNLSGKPTHRTMMYNFPTKAGQCGGVVTSVGKIIGIHIGGNGRQGFCAGLKRGYFASEQ

SEQ ID NO: 168 - DNA, 549 bp, Coxsackievirus
ggaccgagcttagactttgccttatccctcctaaggcgcaacattagacaggtgcaaaccgaccaaggacacttcactatgttaggggtgcgagatcgcctagccattttgccacgccactcgcaaccaggaaaaactatctgggtggagcacaagttaattaatgtgctggatgctgtcgaattagtggatgagcaaggtgtaaacttggaactcacactagtaaccttagacaccaacgaaaagtttagggatgttaccaagtttattccagagacgatcaccggggcaagcgacgcaaccttggtcatcaacactgagcacatgccctcaatgttcgttccagtgggtgatgttgtacaatatggatttctgaatctcagcggtaagcccacacaccgaaccatgatgtacaatttccccacaaaggcaggacagtgtggaggggtggtcacctcagtcggtaagatcataggaattcacattggtgggaatggacgccagggtttctgcgctggactgaagagaggctattttgccagtgaacag

SEQ ID NO: 169 - DNA, 549 bp, Artificial Sequence
  Codon optimised DNA encoding CV-A16 3C protease
ggcccttctctggattttgccctgagcctgctgcggcggaacatcagacaggtgcagacagatcagggccacttcaccatgctgggcgtcagagacagactggccatcctgcctagacacagccagcctggcaagaccatctgggtcgagcacaagctgatcaacgtgctggacgccgtggaactggtggatgaacagggcgtgaacctggaactgaccctggtcaccctggacaccaacgagaagttccgggacgtgaccaagttcatccccgagacaatcaccggcgcctccgatgccacactggtcatcaataccgagcacatgccctccatgttcgtgcctgtgggagatgtggtgcagtacggcttcctgaacctgagcggcaagcccacacaccggaccatgatgtacaacttccctaccaaggccggccagtgcggcggagtggttacatctgtgggcaagatcatcggcatccacatcggcggcaatggcagacagggattttgtgccggcctgaagagaggctacttcgcctctgaacag

SEQ ID NO: 170 - RNA, 549 nt, Artificial Sequence
  Codon optimised RNA encoding CV-A16 3C protease
ggcccuucucuggauuuugcccugagccugcugcggcggaacaucagacaggugcagacagaucagggccacuucaccaugcugggcgucagagacagacuggccauccugccuagacacagccagccuggcaagaccaucugggucgagcacaagcugaucaacgugcuggacgccguggaacugguggaugaacagggcgugaaccuggaacugacccuggucacccuggacaccaacgagaaguuccgggacgugaccaaguucauccccgagacaaucaccggcgccuccgaugccacacuggucaucaauaccgagcacaugcccuccauguucgugccugugggagauguggugcaguacggcuuccugaaccugagcggcaagcccacacaccggaccaugauguacaacuucccuaccaaggccggccagugcggcggagugguuacaucugugggcaagaucaucggcauccacaucggcggcaauggcagacagggauuuugugccggccugaagagaggcuacuucgccucugaacag

SEQ ID NO: 171 - protein, 179 aa, Coxsackievirus
GPSLDFALSLLRRNIRQVQTDQGHFTMLGVRDRLAVLPRHSQPGKTIWVEHKLVNVVDAVELVDEQGVNLELTLITLDTNEKFRDITKFIPENISAASDATLVINTEHMPSMFVPVGDVVQYGFLNLSGKPTHRTMMYNFPTKAGQCGGVVTSVGKVIGIHIGGNGRQGFCAGLKRSYF

SEQ ID NO: 172 - DNA, 537 bp, Coxsackievirus
ggacctagccttgattttgccctatccctactgagaaggaacatcagacaagttcaaacggaccaagggcacttcaccatgctaggagtcagagatcgcttggccgtcctcccacgacactcacaacccggaaaaactatctgggtagagcacaagctagtgaatgttgtggatgctgtcgaactagtggatgagcagggggtcaacttagagctgactttaatcaccctcgacactaatgagaagtttagagacatcaccaaatttattccagagaatatcagcgctgccagcgatgccactctagtgattaatacagagcacatgccttctatgtttgtgccagtaggtgatgttgttcagtatggtttcctgaatcttagtgggaaaccaacccaccgcactatgatgtataacttccctaccaaggcaggacagtgtggaggggtagtcacatcagttggaaaggtcattggtatccacataggaggcaatggcaggcaaggtttctgtgcagggctcaagagaagctacttt

SEQ ID NO: 173 - DNA, 537 bp, Artificial Sequence
  Codon optimised DNA encoding CV-A6 3C protease
ggcccttctctggattttgccctgagcctgctgcggcggaacatcagacaggtgcagacagatcagggccacttcaccatgctgggcgtcagagatagactggccgtgctgcctagacacagccagcctggaaagaccatctgggtcgagcacaagctggtcaacgtggtggatgccgtggaactggtggatgagcagggcgtgaacctggaactgaccctgatcaccctggacaccaacgagaagttccgggacatcaccaagttcatccccgagaacatcagcgccgcctccgatgccacactggtcatcaataccgagcacatgccctccatgttcgtgcctgtgggagatgtggtgcagtacggcttcctgaacctgagcggcaagcccacacaccggaccatgatgtacaacttccctaccaaggccggccagtgcggcggagtggttacatctgtgggcaaagtgatcggaatccacatcggcggcaatggcagacagggcttttgtgccggcctgaagagaagctacttc

SEQ ID NO: 174 - RNA, 537 nt, Artificial Sequence
  Codon optimised RNA encoding CV-A6 3C protease
ggcccuucucuggauuuugcccugagccugcugcggcggaacaucagacaggugcagacagaucagggccacuucaccaugcugggcgucagagauagacuggccgugcugccuagacacagccagccuggaaagaccaucugggucgagcacaagcuggucaacgugguggaugccguggaacugguggaugagcagggcgugaaccuggaacugacccugaucacccuggacaccaacgagaaguuccgggacaucaccaaguucauccccgagaacaucagcgccgccuccgaugccacacuggucaucaauaccgagcacaugcccuccauguucgugccugugggagauguggugcaguacggcuuccugaaccugagcggcaagcccacacaccggaccaugauguacaacuucccuaccaaggccggccagugcggcggagugguuacaucugugggcaaagugaucggaauccacaucggcggcaauggcagacagggcuuuugugccggccugaagagaagcuacuuc

SEQ ID NO: 175 - protein, 183 aa, Enterovirus 68
GPGFDFAQAIMKKNTVIARTEKGEFTMLGVYDRVAVIPTHASVGEIIYINDVETRVLDACALRDLTDTNLEITIVKLDRNQKFRDIRHFLPRCEDDYNDAVLSVHTSKFPNMYIPVGQVTNYGFLNLGGTPTHRILMYNFPTRAGQCGGVVTTTGKVIGIHVGGNGAQGFAAMLLHSYFTDTQ

SEQ ID NO: 176 - DNA, 549 bp, Enterovirus 68
ggaccaggatttgattttgcgcaagccataatgaagaaaaatactgttattgctagaactgaaaaaggcgagttcacaatgcttggtgtgtatgatagagtggcagtcattccaacacatgcatctgttggagaaatcatttacatcaacgatgtagaaaccagagttctagatgcatgtgcacttagagacttgacagacacaaacctagaaataactatagtcaaattggatcgcaatcaaaaatttagagacatcagacactttttacccagatgtgaggatgattacaatgatgctgtgcttagtgtacatacatcaaaattccctaacatgtacattccagttggacaagtcactaactacggcttcttgaacctgggcggcacaccaacacatcggattttaatgtataattttccaacaagagctggtcagtgtggtggtgtggtgacaaccacaggtaaagtgataggaatacacgtgggcgggaatggagctcagggattcgcagcaatgttgctccactcttactttactgatacacaa

SEQ ID NO: 177 - DNA, 549 bp, Artificial Sequence
  Codon optimised DNA encoding EV D-68 3C protease
ggccctggctttgattttgcccaggccatcatgaagaaaaacaccgtgatcgcccggaccgagaagggcgagtttacaatgctgggcgtgtacgacagagtggccgtgattcctacacacgcctctgtgggcgagatcatctacatcaacgacgtggaaaccagagtgctggacgcctgcgctctgagagatctgaccgacaccaacctggaaatcaccatcgtgaagctggaccggaaccagaagttccgggacatccggcactttctgcccagatgcgaggacgactacaacgacgctgtgctgagcgtgcacaccagcaagttccccaacatgtacatccccgtgggccaagtgaccaactacggcttcctgaatctcggcggcacccctacacaccggatcctgatgtacaacttccccaccagagccggccagtgtggcggagtggttaccacaacaggcaaagtgatcggcatccacgtcggcggaaatggcgctcagggatttgctgccatgctgctgcacagctacttcaccgacacacag

SEQ ID NO: 178 - RNA, 549 nt, Artificial Sequence
  Codon optimised RNA encoding EV D-68 3C protease
ggcccuggcuuugauuuugcccaggccaucaugaagaaaaacaccgugaucgcccggaccgagaagggcgaguuuacaaugcugggcguguacgacagaguggccgugauuccuacacacgccucugugggcgagaucaucuacaucaacgacguggaaaccagagugcuggacgccugcgcucugagagaucugaccgacaccaaccuggaaaucaccaucgugaagcuggaccggaaccagaaguuccgggacauccggcacuuucugcccagaugcgaggacgacuacaacgacgcugugcugagcgugcacaccagcaaguuccccaacauguacauccccgugggccaagugaccaacuacggcuuccugaaucucggcggcaccccuacacaccggauccugauguacaacuuccccaccagagccggccaguguggcggagugguuaccacaacaggcaaagugaucggcauccacgucggcggaaauggcgcucagggauuugcugccaugcugcugcacagcuacuucaccgacacacag

SEQ ID NO: 179 - protein, 179 aa, Enterovirus 71
GPSLDFALSLLRRNIRQVQTDQGHFTMLGVRDHLAVLPRHSQPGKTIWVEHKLVKIVDAVELVDEQGVNLELTLVTLDTNEKFRDITRFIPETISPASDATLVINTEHMPSMFVPVGDVVQYGFLNLSGKPTHRTMMYNFPTKAGQCGGAVTAVGKVIGIHIGGNGRQGFCAALKRGYF

SEQ ID NO: 180 - DNA, 537 bp, Enterovirus 71
gggccgagcttggacttcgccctatctctacttaggaggaacattaggcaggtccaaaccgaccagggccactttacaatgttaggagtgcgagaccacttggctgtgctccccagacactcccaaccaggaaagaccatctgggttgaacacaaattagtgaagatcgtagacgctgtggagctagtagatgaacaaggggttaacctagagctcacactggtaacgcttgacaccaacgaaaaatttagagacatcacaagattcataccagaaacaattagtcctgctagtgatgccactttagttataaatactgaacatatgcccagtatgtttgtgccagttggagatgtggtccagtatggatttttgaaccttagtggtaagcccactcacaggactatgatgtacaatttcccaacaaaagcaggacagtgtggtggtgctgtgactgccgtaggtaaagtgattgggattcacattggtggcaacggtagacaaggtttctgcgctgccctgaagaggggttacttt

SEQ ID NO: 181 - DNA, 537 bp, Artificial Sequence
  Codon optimised DNA encoding EVD-71 3C protease
ggcccttctctggattttgccctgagcctgctgcggcggaacatcagacaggtgcagacagatcagggccacttcaccatgctgggcgtcagagatcatctggccgtgctgcctagacacagccagcctggaaagaccatctgggtcgagcacaagctggtcaagatcgtggacgccgtggaactggtggatgagcagggcgttaacctggaactgaccctggtcaccctggacaccaacgagaagttccgggacatcacccggttcatccccgagacaattagccctgcctccgacgccacactggtcatcaataccgagcacatgccctccatgttcgtgcctgtgggagatgtggtgcagtacggcttcctgaacctgagcggcaagcccacacaccggaccatgatgtacaacttccctaccaaggccggccagtgcggcggagctgttacagctgtgggaaaagtgatcggcatccacatcggcggcaatggcagacagggattctgtgccgctctgaagagaggctacttc

SEQ ID NO: 182 - RNA, 537 nt, Artificial Sequence
  Codon optimised RNA encoding EVD-71 3C protease
ggcccuucucuggauuuugcccugagccugcugcggcggaacaucagacaggugcagacagaucagggccacuucaccaugcugggcgucagagaucaucuggccgugcugccuagacacagccagccuggaaagaccaucugggucgagcacaagcuggucaagaucguggacgccguggaacugguggaugagcagggcguuaaccuggaacugacccuggucacccuggacaccaacgagaaguuccgggacaucacccgguucauccccgagacaauuagcccugccuccgacgccacacuggucaucaauaccgagcacaugcccuccauguucgugccugugggagauguggugcaguacggcuuccugaaccugagcggcaagcccacacaccggaccaugauguacaacuucccuaccaaggccggccagugcggcggagcuguuacagcugugggaaaagugaucggcauccacaucggcggcaauggcagacagggauucugugccgcucugaagagaggcuacuuc

SEQ ID NO: 183 - protein, 183 aa, Poliovirus
GPGFDYAVAMAKRNIVTATTSKGEFTMLGVHDNVAILPTHASPGESIVIDGKEVEILDAKALEDQAGTNLEITIITLKRNEKFRDIRPHIPTQITETNDGVLIVNTSKYPNMYVPVGAVTEQGYLNLGGRQTARTLMYNFPTRAGQCGGVITCTGKVIGMHVGGNGSHGFAAALKRSYFTQSQ

SEQ ID NO: 184 - DNA, 549 bp, Poliovirus
ggaccagggttcgattacgcagtggctatggctaaaagaaacattgttacagcaactactagcaagggagagttcactatgttaggagtccacgacaacgtggctattttaccaacccacgcttcacctggtgaaagcattgtgatcgatggcaaagaagtggagatcttggatgccaaagcgctcgaagatcaagcaggaaccaatcttgaaatcactataatcactctaaagagaaatgaaaagttcagagacattagaccacatatacctactcaaatcactgagacaaatgatggagtcttgatcgtgaacactagcaagtaccccaatatgtatgttcctgtcggtgctgtgactgaacagggatatctaaatctcggtgggcgccaaactgctcgtactctaatgtacaactttccaaccagagcaggacagtgtggtggagtcatcacatgtactgggaaagtcatcgggatgcatgttggtgggaacggttcacacgggtttgcagcggccctgaagcgatcatacttcactcagagtcaa

SEQ ID NO: 185 - DNA, 549 bp, Artificial Sequence
  Codon optimised DNA encoding Poliovirus HEV-C 3C protease
ggccctggctttgattatgccgtggccatggctaagcggaacatcgtgacagccaccaccagcaagggcgagtttacaatgctgggcgtgcacgacaacgtggccatcctgcctacacatgctagccctggcgagagcatcgtgatcgacggcaaagaggtggaaatcctggacgccaaggctctggaagatcaggccggcaccaacctggaaatcaccatcatcaccctgaagcggaacgagaagttccgggacatcagacctcacatccccacacagatcaccgagacaaacgacggcgtgctgatcgtgaataccagcaagtaccccaatatgtacgtgcccgtgggcgccgtgacagagcagggatatctgaatctcggcggcagacagaccgccagaacactgatgtacaacttccccaccagagccggccagtgcggcggagtgattacatgtaccggcaaagtgatcggcatgcacgtcggcggcaatggctctcacggatttgctgccgctctgaagagaagctacttcacccagagccag

SEQ ID NO: 186 - RNA, 549 nt, Artificial Sequence
  Codon optimised RNA encpding Poliovirus HEV-C 3C protease
ggcccuggcuuugauuaugccguggccauggcuaagcggaacaucgugacagccaccaccagcaagggcgaguuuacaaugcugggcgugcacgacaacguggccauccugccuacacaugcuagcccuggcgagagcaucgugaucgacggcaaagagguggaaauccuggacgccaaggcucuggaagaucaggccggcaccaaccuggaaaucaccaucaucacccugaagcggaacgagaaguuccgggacaucagaccucacauccccacacagaucaccgagacaaacgacggcgugcugaucgugaauaccagcaaguaccccaauauguacgugcccgugggcgccgugacagagcagggauaucugaaucucggcggcagacagaccgccagaacacugauguacaacuuccccaccagagccggccagugcggcggagugauuacauguaccggcaaagugaucggcaugcacgucggcggcaauggcucucacggauuugcugccgcucugaagagaagcuacuucacccagagccag

SEQ ID NO: 187 - protein, 149 aa, Poliovirus
GFGHQNKAVYTAGYKICNYHLATQDDLQNAVNVMWSRDLLVTESRAQGTDSIARCNCNAGVYYCESRRKYYPVSFVGPTFQYMEANNYYPARYQSHMLIGHGFASPGDCGGILRCHHGVIGIITAGGEGLVAFSDIRDLYAYEEEAMEQ

SEQ ID NO: 188 - DNA, 447 bp, Poliovirus
ggattcggacaccaaaacaaagcggtgtacactgcaggttacaaaatttgcaactaccacttggccactcaggatgatttgcaaaacgcagtgaacgtcatgtggagtagagacctcttagtcacagaatcaagagcccagggcaccgattcaatcgcaaggtgcaattgcaacgcaggggtgtactactgcgagtctagaaggaaatactacccagtatccttcgttggcccaacgttccagtacatggaggctaataactattacccagctaggtaccagtcccatatgctcattggccatggattcgcatctccaggggattgtggtggcatactcagatgtcaccacggggtgatagggatcattactgctggtggcgaagggttggttgcattttcagacattagagacttgtatgcctacgaagaagaagccatggaacaa

SEQ ID NO: 189 - DNA, 447 bp, Artificial Sequence
  Codon optimised DNA encoding Poliovirus HEV-C 2A protease
ggctttggccaccagaacaaggccgtgtacacagccggctacaagatctgcaactaccacctggccacacaggacgacctgcagaacgccgtgaatgtgatgtggtccagggacctgctggtcaccgaatctagagcccagggcaccgactctatcgccagatgcaactgtaatgccggcgtgtactactgcgagagccggcggaagtactaccccgtgtcttttgtgggccccaccttccagtacatggaagccaacaactactaccctgccagataccagagccacatgctgatcggccacggctttgctagccctggcgattgtggcggcatcctgagatgtcaccatggcgtgatcggcatcatcaccgctggcggagaaggactggtggccttcagcgacatcagagatctgtacgcctacgaagaggaagccatggaacag

SEQ ID NO: 190 - RNA, 447 nt, Artificial Sequence
  Codon optimised RNA encoding Poliovirus HEV-C 2A protease
ggcuuuggccaccagaacaaggccguguacacagccggcuacaagaucugcaacuaccaccuggccacacaggacgaccugcagaacgccgugaaugugaugugguccagggaccugcuggucaccgaaucuagagcccagggcaccgacucuaucgccagaugcaacuguaaugccggcguguacuacugcgagagccggcggaaguacuaccccgugucuuuugugggccccaccuuccaguacauggaagccaacaacuacuacccugccagauaccagagccacaugcugaucggccacggcuuugcuagcccuggcgauuguggcggcauccugagaugucaccauggcgugaucggcaucaucaccgcuggcggagaaggacugguggccuucagcgacaucagagaucuguacgccuacgaagaggaagccauggaacag

SEQ ID NO: 191 - protein, 150 aa, Coxsackievirus
GAFGQQSGAVYVGNYRVVNRHLATSADWQNCVWESYNRDLLVSTTTAHGCDIIARCQCTTGVYFCASKNKHYPISFEGPGLVEVQESEYYPRRYQSHVLLAAGFSEPGDCGGILRCEHGVIGIVTMGGEGVVGFADIRDLLWLEDDAMEQ

SEQ ID NO: 192 - DNA, 450 bp, Coxsackievirus
ggcgcatttggacaacaatcaggggcagtgtatgtggggaactacagggtggtaaatagacatctagctaccagtgctgactggcaaaactgtgtgtgggaaagttacaacagagacctcttagtgagcacgaccacagcacatggatgtgatattatagccagatgtcagtgcacaacgggagtgtacttttgtgcgtccaaaaacaagcactacccaatttcgtttgaaggaccaggtctagtagaggtccaagagagtgaatactaccccaggagataccaatcccatgtgcttttagcagctggattttccgaaccaggtgactgtggcggtatcctaaggtgtgagcatggtgtcattggcattgtgaccatggggggtgaaggcgtggtcggctttgcagacatccgtgatctcctgtggctggaagatgatgcaatggaacag

SEQ ID NO: 193 - DNA, 450 bp, Artificial Sequence
  Codon optimised DNA encoding CVB3 2A protease
ggagcttttggacagcagtctggcgccgtgtacgtgggcaattaccgggtcgtgaatagacacctggccacctctgccgactggcagaattgtgtgtgggagagctacaaccgggacctgctggtgtctaccacaacagcccacggctgcgacatcattgccagatgccagtgtacaaccggcgtgtacttctgcgccagcaagaacaagcactaccccatcagcttcgaaggccctggcctggtggaagtgcaagagagcgagtactaccctcggagataccagagccacgtgctgctggccgctggcttttctgaacctggcgattgtggcggcatcctgagatgtgaacacggcgtgatcggcatcgtgaccatgggcggagaaggcgttgtgggcttcgccgacattagagatctgctgtggctggaagatgacgccatggaacag

SEQ ID NO: 194 - RNA, 450 nt, Artificial Sequence
  Codon optimised RNA encoding CVB3 2A protease
ggagcuuuuggacagcagucuggcgccguguacgugggcaauuaccgggucgugaauagacaccuggccaccucugccgacuggcagaauugugugugggagagcuacaaccgggaccugcuggugucuaccacaacagcccacggcugcgacaucauugccagaugccaguguacaaccggcguguacuucugcgccagcaagaacaagcacuaccccaucagcuucgaaggcccuggccugguggaagugcaagagagcgaguacuacccucggagauaccagagccacgugcugcuggccgcuggcuuuucugaaccuggcgauuguggcggcauccugagaugugaacacggcgugaucggcaucgugaccaugggcggagaaggcguugugggcuucgccgacauuagagaucugcuguggcuggaagaugacgccauggaacag

SEQ ID NO: 195 - protein, 150 aa, Enterovirus 71
GKFGQQSGAIYVGNFRVVNRHLATHNDWANLVWEDSSRDLLVSSTTAQGCDTIARCNCQTGVYYCNSRRKHYPVSFSKPSLIYVEASEYYPARYQSHLMLAQGHSEPGDCGGILRCQHGVVGIVSTGGNGLVGFADVRDLLWLDEEAMEQ

SEQ ID NO: 196 - DNA, 450 bp, Enterovirus 71
ggaaaatttgggcaacagtctggggccatttatgtgggtaactttagagtggtcaaccgtcatcttgccactcacaatgattgggcaaatcttgtttgggaagacagctctcgcgacttactcgtgtcatccaccaccgcccaaggttgtgacacgattgcccgctgcaattgccagacaggggtgtactactgtaactcgaggagaaaacactacccagtcagtttttcaaaacccagtctgatctatgtagaggctagcgagtattacccagccaggtaccagtcacatcttatgctcgcacagggccactcagagcctggtgattgcggtggtatccttagatgccaacatggcgtcgtcggtatagtgtcaactggtggtaacgggctcgttggctttgcagacgtcagggacctcttgtggttagatgaagaagctatggagcag

SEQ ID NO: 197 - DNA, 450 bp, Artificial Sequence
  Codon optimised DNA encoding EV71 2A protease
ggcaagtttggacagcagagcggcgccatctacgtgggcaatttccgggtcgtgaaccggcacctggccacacataacgactgggccaatctcgtgtgggaagatagcagcagggacctgctggtgtccagcacaacagcccagggctgcgatacaatcgccagatgcaattgccagaccggcgtgtactactgcaacagcagacggaagcactaccccgtgtccttcagcaagcccagcctgatctatgtggaagccagcgagtactaccccgccagataccagtctcacctgatgctggcccagggccattctgagccaggcgattgtggcggaatcctgagatgccagcatggcgtcgtgggcattgtgtctaccggcggaaatggcctcgtgggatttgccgatgttcgcgacctgctgtggctggacgaagaggctatggaacag

SEQ ID NO: 198 - RNA, 450 nt, Artificial Sequence
  Codon optimised RNA encoding EV71 2A protease
ggcaaguuuggacagcagagcggcgccaucuacgugggcaauuuccgggucgugaaccggcaccuggccacacauaacgacugggccaaucucgugugggaagauagcagcagggaccugcugguguccagcacaacagcccagggcugcgauacaaucgccagaugcaauugccagaccggcguguacuacugcaacagcagacggaagcacuaccccguguccuucagcaagcccagccugaucuauguggaagccagcgaguacuaccccgccagauaccagucucaccugaugcuggcccagggccauucugagccaggcgauuguggcggaauccugagaugccagcauggcgucgugggcauugugucuaccggcggaaauggccucgugggauuugccgauguucgcgaccugcuguggcuggacgaagaggcuauggaacag

SEQ ID NO: 199 - protein, 219 aa, Human metapneumovirus
MEVKVENIRAIDMLKARVKNRVARSKCFKNASLILIGITTLSIALNIYLIINYTIQKTSSESEHHTSSPPTESNKEASTISTDNPDINPNSQHPTQQSTENPTLNPAASVSPSETEPASTPDTTNRLSSVDRSTAQPSESRTKTKPTVHTRNNPSTASSTQSPPRATTKAIRRATTFRMSSTGKRPTTTSVQSDSSTTTQNHEETGSANPQASVSTMQN

SEQ ID NO: 200 - DNA, 657 bp, Human metapneumovirus
atggaggtgaaagtagagaacattcgagcaatagacatgctcaaagcaagagtgaaaaatcgtgtggcacgtagcaaatgctttaaaaatgcttctttaatcctcataggaataactacactgagtatagctctcaatatctatctgatcataaactacacaatacaaaaaacctcatctgaatcagaacaccacaccagctcaccacccacagaatccaacaaggaagcttcaacaatctccacagacaacccagacatcaatccaaactcacagcatccaactcaacagtccacagaaaaccccacactcaaccccgcagcatcagtgagcccatcagaaacagaaccagcatcaacaccagacacaacaaaccgcctgtcctccgtagacaggtccacagcacaaccaagtgaaagcagaacaaagacaaaaccgacagtccacacaagaaacaacccaagcacagcttccagtacacaatccccaccacgggcaacaacgaaggcaatccgcagagccaccactttccgcatgagcagcacaggaaaaagaccaaccacaacatcagtccagtccgacagcagcaccacaacccaaaatcatgaagaaacaggttcagcgaacccacaggcatctgtaagcacaatgcaaaac

SEQ ID NO: 201 - DNA, 657 bp, Artificial Sequence
  Codon optimised DNA encoding hMPV G protein
atggaagtgaaggtcgagaacatccgggccatcgacatgctgaaggccagagtgaagaacagagtggcccggtccaagtgcttcaagaacgccagcctgatcctgatcggcatcaccacactgtctatcgccctgaacatctacctgatcatcaactacaccatccagaaaaccagcagcgagagcgagcaccacacaagctctccacctaccgagagcaacaaagaggccagcaccatcagcaccgacaatcccgacatcaaccccaactctcagcaccccacacagcagtccaccgagaatcccacactgaaccctgccgcctctgtgtccccatctgagacagaacctgccagcacacccgacaccaccaacagactgtctagcgtggacagaagcacagcccagcctagcgagagccggaccaagacaaaacctaccgtgcacacccggaacaaccctagcacagccagctctacacagagccctccaagagccaccaccaaggccattagaagggccaccaccttccggatgagcagcaccggcaaaagacctaccaccaccagcgtgcagagcgacagcagcacaaccacacagaaccacgaggaaaccggcagcgccaatcctcaggctagcgtgtccaccatgcagaac

SEQ ID NO: 202 - RNA, 657 nt, Artificial Sequence
  Codon optimised RNA encoding hMPV G protein
auggaagugaaggucgagaacauccgggccaucgacaugcugaaggccagagugaagaacagaguggcccgguccaagugcuucaagaacgccagccugauccugaucggcaucaccacacugucuaucgcccugaacaucuaccugaucaucaacuacaccauccagaaaaccagcagcgagagcgagcaccacacaagcucuccaccuaccgagagcaacaaagaggccagcaccaucagcaccgacaaucccgacaucaaccccaacucucagcaccccacacagcaguccaccgagaaucccacacugaacccugccgccucuguguccccaucugagacagaaccugccagcacacccgacaccaccaacagacugucuagcguggacagaagcacagcccagccuagcgagagccggaccaagacaaaaccuaccgugcacacccggaacaacccuagcacagccagcucuacacagagcccuccaagagccaccaccaaggccauuagaagggccaccaccuuccggaugagcagcaccggcaaaagaccuaccaccaccagcgugcagagcgacagcagcacaaccacacagaaccacgaggaaaccggcagcgccaauccucaggcuagcguguccaccaugcagaac

SEQ ID NO: 203 - protein, 183 aa, Coxsackievirus
GPAFEFAVAMMKRNSSTVKTEYGEFTMLGIYDRWAVLPRHAKPGPTILMNDQEVGVLDAKELVDKDGTNLELTLLKLNRNEKFRDIRGFLAKEEVEVNEAVLAINTSKFPNMYIPVGQVTEYGFLNLGGTPTKRMLMYNFPTRAGQCGGVLMSTGKVLGIHVGGNGHQGFSAALLKHYFNDEQ

SEQ ID NO: 204 - DNA, 549 bp, Coxsackievirus
ggccctgcctttgagttcgccgtcgcaatgatgaaaaggaactcaagcacggtgaaaactgaatatggcgagtttaccatgctgggcatctatgacaggtgggccgttttgccacgccacgccaaacctgggccaaccatcttgatgaatgatcaagaggttggtgtgctagatgccaaggagctagtagacaaggacggcaccaacttagaactgacactactcaaattgaaccggaatgagaagttcagagacatcagaggcttcttagccaaggaggaagtggaggttaatgaggcagtgctagcaattaacaccagcaagtttcccaacatgtacattccagtaggacaggtcacagaatacggcttcctaaacctaggtggcacacccaccaagagaatgcttatgtacaacttccccacaagagcaggccagtgtggtggagtgctcatgtccaccggcaaggtactgggtatccatgttggtggaaatggccatcagggcttctcagcagcactcctcaaacactacttcaatgatgagcaa

SEQ ID NO: 205 - DNA, 549 bp, Artificial Sequence
  Codon optimised DNA encoding CVB3 3C protease
ggacctgcctttgaattcgccgtggccatgatgaagcggaacagcagcaccgtgaaaaccgagtacggcgagttcaccatgctgggcatctacgacagatgggccgtgctgcctagacacgccaaacctggacctaccatcctgatgaacgaccaagaagtgggcgttctggacgccaaagaactggtggacaaggacggcaccaacctggaactgaccctgctgaagctgaaccggaacgagaagttccgggatatcagaggcttcctggccaaagaagaggtggaagtcaacgaagccgtgctggccatcaacaccagcaagttccccaacatgtacatccccgtgggccaagtgacagagtacggcttcctgaatctcggcggcacccctaccaagcggatgctgatgtacaacttccccaccagagccggccagtgtggcggagttcttatgtctaccggcaaggtgctgggaatccacgttggcggaaatggccaccagggcttttctgccgctctgctgaaacactacttcaacgacgagcag

SEQ ID NO: 206 - RNA, 549 nt, Artificial Sequence
  Codon optimised RNA encoding CVB3 3C protease
ggaccugccuuugaauucgccguggccaugaugaagcggaacagcagcaccgugaaaaccgaguacggcgaguucaccaugcugggcaucuacgacagaugggccgugcugccuagacacgccaaaccuggaccuaccauccugaugaacgaccaagaagugggcguucuggacgccaaagaacugguggacaaggacggcaccaaccuggaacugacccugcugaagcugaaccggaacgagaaguuccgggauaucagaggcuuccuggccaaagaagagguggaagucaacgaagccgugcuggccaucaacaccagcaaguuccccaacauguacauccccgugggccaagugacagaguacggcuuccugaaucucggcggcaccccuaccaagcggaugcugauguacaacuuccccaccagagccggccaguguggcggaguucuuaugucuaccggcaaggugcugggaauccacguuggcggaaauggccaccagggcuuuucugccgcucugcugaaacacuacuucaacgacgagcag

SEQ ID NO: 207 - protein, 631 aa, Hepatitis C virus
APITAYAQQTRGLFSTIVTSLTGRDTNENCGEVQVLSTATQSFLGTAVNGVMWTVYHGAGAKTISGPKGPVNQMYTNVDQDLVGWPAPPGVRSLAPCTCGSADLYLVTRHADVIPVRRRGDTRGALLSPRPISILKGSSGGPLLCPMGHRAGIFRAAVCTRGVAKAVDFVPVESLETTMRSPVFTDNSTPPAVPQTYQVAHLHAPTGSGKSTKVPAAHAAQGYKVLVLNPSVAATLGFGVYMSKAYGIDPNIRSGVRTITTGAPITYSTYGKFLADGGCSGGAYDIIICDECYSTDSTTILGIGTVLDQAETAGVRLTVLATATPPGSVTTPHSNIEEVALPTTGEIPFYGKAIPLELIKGGRHLIFCHSKKKCDELARQLTSLGLNAVAYYRGLDVSVIPTSGDVVVCATDALMTGFTGDFDSVIDCNTSVIQTVDFSLDPTFSIEITTVPQDAVSRSQRRGRTGRGRLGTYRYVTPGERPSGMFDTAELCECYDAGCAWYELTPAETTTRLKAYFDTPGLPVCQDHLEFWESVFTGLTHIDGHFLSQTKQSGENFPYLVAYQATVSAKVWLAPPSWDTMWKCLIRLKPTLHGPTPLLYRLGSVQNEVVLTHPITKYIMACMSADLEVVT

SEQ ID NO: 208 - DNA, 1893 bp, Hepatitis C virus
gcccccatcacagcatacgcacagcagacccgcggcttgttcagcaccatcgtaacgagcctcactggcagggacaccaatgagaattgtggcgaagtgcaggtcttatccaccgctacgcagtccttcctgggtactgcggttaacggcgtgatgtggaccgtctaccacggggcgggtgccaagaccatcagcggcccgaagggacctgtcaatcaaatgtacactaatgttgaccaagacttggtggggtggccagcaccccccggagtcagatctcttgctccgtgcacctgcggctcggcagacttgtatctagtcaccaggcacgcggatgtaatacccgtgcgcaggagaggagacaccagaggagctctcttgagccctagaccaatatccattcttaagggatcttccggaggtccgctgctgtgccccatgggacaccgcgccggcatattccgtgcggcggtgtgtactcggggggtagccaaggcggtagacttcgtcccggttgaatctcttgagactaccatgagatcaccagtgttcactgacaactcaacacccccagcagtgccccagacctaccaggtcgcgcacctacacgcaccaacaggaagtggcaagagcactaaggtcccggcggcgcatgctgcccaaggctataaagtgctagtgctcaatccttcggttgcggccacactgggttttggggtatacatgtccaaggcatatggcatcgacccgaacatccggtcgggagtcaggaccatcaccacgggtgcgccaatcacgtactcaacgtatggtaagttcctggctgatggaggttgcagcggaggggcatacgacataatcatctgtgacgagtgctattccactgactccacaacgatccttggcataggcacagtcctggaccaagcggagaccgctggagtgcgcctcaccgtgctcgcgactgctactccgccagggtcagtgactacacctcattccaacatagaggaggtcgccctgccaacaacgggggaaatacccttttacggcaaggcgatccctctggagctgatcaaggggggcagacatctcatcttctgccattcaaagaaaaagtgcgatgaactggccagacaactgacatctcttggtctgaatgccgtagcctactacagaggcttagacgtttcggtgattcccacgtctggggacgtcgtggtatgcgccacggacgccctcatgacgggtttcaccggcgactttgactcagtgatagactgcaatacatctgtgatacagactgttgacttcagcttggaccccaccttctccatagagattacaaccgttccccaggacgcggtatcccgcagccagcggagaggccgcactggtagggggaggttgggcacataccggtatgtcaccccgggagagagaccatcaggcatgtttgacactgcagagctttgcgagtgctacgatgccgggtgcgcctggtacgagctgacacctgctgaaaccacaacaaggctgaaagcttacttcgacacaccaggccttcctgtgtgccaagaccatctggaattctgggagagcgtctttacagggttaacccacatagacggtcatttcctatcccagaccaagcaatcgggtgagaatttcccgtatcttgttgcttaccaagcgacggtgtcggccaaggtctggctcgctccaccaagctgggacaccatgtggaagtgcctaattcgccttaagcccaccctgcacgggcccacgcccctcctctacagactggggtctgtgcagaatgaagtggtgctcacccatcccatcaccaaatacatcatggcttgcatgtcagctgatctcgaggtagtgaca

SEQ ID NO: 209 - DNA, 1893 bp, Artificial Sequence
  Codon optimised DNA encoding Hepatitis C NS3/4A protein
gcccctatcacagcctacgctcagcagaccagaggcctgttcagcaccatcgtgacaagcctgaccggcagagacaccaacgagaattgtggcgaggtgcaggtcctgtctacagctacccagagctttctgggcaccgccgtgaatggcgtgatgtggacagtgtatcatggcgctggcgccaagacaatctctggccctaagggccccgtgaaccagatgtacaccaacgtggaccaggacctcgttggctggcctgctcctcctggtgttagaagcctggctccttgtacatgcggcagcgccgatctgtacctggtcacaagacacgccgacgtgatccccgtcagaagaagaggcgatacaagaggcgccctgctgagccctagacctatctctatcctgaagggcagctctggcggccctctgctttgtcctatgggacacagagccggcatcttcagagccgccgtgtgtactagaggcgtggccaaggctgtggacttcgtgcctgtggaaagcctggaaaccaccatgagaagccccgtgttcaccgacaacagcacccctccagctgtgcctcagacataccaggtggcccatctgcatgcccctacaggctctggcaagagcacaaaagtgcctgccgctcatgctgcccagggctataaggtgctggtgctcaatcctagcgtggccgccacactcggctttggcgtgtacatgtctaaggcctacggcatcgaccccaacatcagatctggcgtgcggaccatcacaacaggcgccccaatcacctactctacctacggcaagttcctggccgatggcggatgttctggcggagcctacgacatcatcatctgcgacgagtgctacagcaccgacagcaccacaatcctcggcatcggcacagtgctggatcaggctgaaacagccggcgtcagactgactgtgctggccacagctacacctccaggcagcgtgacaacccctcacagcaacatcgaggaagtggccctgcctacaaccggcgagatcccattctatggcaaggccattcctctcgagctgatcaaaggcggcagacacctgatcttttgccacagcaagaagaagtgcgacgagctggccagacagctgacatccctgggactgaatgccgtggcctactacagaggactggacgtgtccgtgattcccacatctggcgacgtggtcgtgtgtgccacagatgccctgatgaccggcttcaccggcgacttcgatagcgtgatcgactgcaacaccagcgtgatccagaccgtggacttctctctggaccccaccttcagcatcgagatcaccaccgttcctcaggacgccgtgtctcggtcacagagaagaggcagaacaggcagaggccggctgggcacatacagatatgtgacacccggcgaaagacccagcggcatgtttgatacagccgagctgtgcgagtgttacgacgccggatgtgcttggtacgagctgacaccagccgagacaaccaccagactgaaggcctacttcgacacccctggcctgcctgtgtgtcaggaccacctggaattttgggagagcgtgttcacaggactgacccacatcgacggccactttctgagccagaccaagcagagcggcgagaacttcccttacctggtggcctatcaggctaccgtgtccgccaaagtttggctggctcctcctagctgggacaccatgtggaagtgcctgatccggctgaagcctacactgcacggacctacacctctgctgtacagactgggcagcgtgcagaatgaggtggtgctgacccatcctatcaccaagtacatcatggcctgcatgagcgccgacctggaagtggttaca

SEQ ID NO: 210 - RNA, 1893 nt, Artificial Sequence
  Codon optimised RNA encoding Hepatitis C NS3/4A protein
gccccuaucacagccuacgcucagcagaccagaggccuguucagcaccaucgugacaagccugaccggcagagacaccaacgagaauuguggcgaggugcagguccugucuacagcuacccagagcuuucugggcaccgccgugaauggcgugauguggacaguguaucauggcgcuggcgccaagacaaucucuggcccuaagggccccgugaaccagauguacaccaacguggaccaggaccucguuggcuggccugcuccuccugguguuagaagccuggcuccuuguacaugcggcagcgccgaucuguaccuggucacaagacacgccgacgugauccccgucagaagaagaggcgauacaagaggcgcccugcugagcccuagaccuaucucuauccugaagggcagcucuggcggcccucugcuuuguccuaugggacacagagccggcaucuucagagccgccguguguacuagaggcguggccaaggcuguggacuucgugccuguggaaagccuggaaaccaccaugagaagccccguguucaccgacaacagcaccccuccagcugugccucagacauaccagguggcccaucugcaugccccuacaggcucuggcaagagcacaaaagugccugccgcucaugcugcccagggcuauaaggugcuggugcucaauccuagcguggccgccacacucggcuuuggcguguacaugucuaaggccuacggcaucgaccccaacaucagaucuggcgugcggaccaucacaacaggcgccccaaucaccuacucuaccuacggcaaguuccuggccgauggcggauguucuggcggagccuacgacaucaucaucugcgacgagugcuacagcaccgacagcaccacaauccucggcaucggcacagugcuggaucaggcugaaacagccggcgucagacugacugugcuggccacagcuacaccuccaggcagcgugacaaccccucacagcaacaucgaggaaguggcccugccuacaaccggcgagaucccauucuauggcaaggccauuccucucgagcugaucaaaggcggcagacaccugaucuuuugccacagcaagaagaagugcgacgagcuggccagacagcugacaucccugggacugaaugccguggccuacuacagaggacuggacguguccgugauucccacaucuggcgacguggucgugugugccacagaugcccugaugaccggcuucaccggcgacuucgauagcgugaucgacugcaacaccagcgugauccagaccguggacuucucucuggaccccaccuucagcaucgagaucaccaccguuccucaggacgccgugucucggucacagagaagaggcagaacaggcagaggccggcugggcacauacagauaugugacacccggcgaaagacccagcggcauguuugauacagccgagcugugcgaguguuacgacgccggaugugcuugguacgagcugacaccagccgagacaaccaccagacugaaggccuacuucgacaccccuggccugccugugugucaggaccaccuggaauuuugggagagcguguucacaggacugacccacaucgacggccacuuucugagccagaccaagcagagcggcgagaacuucccuuaccugguggccuaucaggcuaccguguccgccaaaguuuggcuggcuccuccuagcugggacaccauguggaagugccugauccggcugaagccuacacugcacggaccuacaccucugcuguacagacugggcagcgugcagaaugagguggugcugacccauccuaucaccaaguacaucauggccugcaugagcgccgaccuggaagugguuaca

SEQ ID NO: 211 - protein, 619 aa, Dengue virus
SGVLWDTPSPPEVERAVLDDGIYRILQRGLLGRSQVGVGVFQEGVFHTMWHVTRGAVLMYQGKRLEPSWASVKKDLISYGGGWRFQGSWNAGEEVQVIAVEPGKNPKNVQTAPGTFKTPEGEVGAIALDFKPGTSGSPIVNREGKIVGLYGNGVVTTSGTYVSAIAQAKASQEGPLPEIEDEVFRKRNLTIMDLHPGSGKTRRYLPAIVREAIRRNVRTLVLAPTRVVASEMAEALKGMPIRYQTTAVKSEHTGKEIVDLMCHATFTMRLLSPVRVPNYNMIIMDEAHFTDPASIAARGYISTRVGMGEAAAIFMTATPPGSVEAFPQSNAVIQDEERDIPERSWNSGYDWITDFPGKTVWFVPSIKSGNDIANCLRKNGKRVVQLSRKTFDTEYQKTKNNDWDYVVTTDISEMGANFRADRVIDPRRCLKPVILKDGPERVILAGPMPVTVASAAQRRGRIGRNQNKEGDQYIYMGQPLNNDEDHAHWTEAKMLLDNINTPEGIIPALFEPEREKSAAIDGEYRLRGEARKTFVELMRRGDLPVWLSYKVASEGFQYSDRRWCFDGERNNQVLEENMDVEIWTKEGERKKLRPRWLDARTYSDPLALREFKEFAAGRR

SEQ ID NO: 212 - DNA, 1857 bp, Dengue virus
tcaggagtgctatgggacacacccagccctccagaagtggaaagagcagtccttgatgatggcatttatagaattctccaaagaggattgttgggcaggtctcaagtaggagtaggagtttttcaagaaggcgtgttccacacaatgtggcacgtcaccaggggagctgtcctcatgtaccaagggaagagactggaaccaagttgggccagtgtcaaaaaagacttgatctcatatggaggaggttggaggtttcaaggatcctggaacgcgggagaagaagtgcaggtgattgctgttgaaccggggaagaaccccaaaaatgtacagacagcgccgggtaccttcaagacccctgaaggcgaagttggagccatagctctagactttaaacccggcacatctggatctcctatcgtgaacagagagggaaaaatagtaggtctttatggaaatggagtggtgacaacaagtggtacctacgtcagcgccatagctcaagctaaagcatcacaagaagggcctctaccagagattgaggacgaggtgtttaggaaaagaaacttaacaataatggacctacatccaggatcggggaaaacaagaagatatcttccagccatagtccgtgaggccataagaaggaacgtgcgcacgctagtcttagctcccacaagagttgtcgcttctgaaatggcagaggcgctcaagggaatgccaataaggtatcagacaacagcagtgaagagtgaacacacaggaaaagagatagttgaccttatgtgtcacgccactttcactatgcgtctcctgtctcctgtgagagttcccaattataatatgattatcatggatgaagcacattttaccgatccagccagcatagcagccagagggtatatctcaacccgagtgggtatgggtgaagcagctgcgattttcatgacagccactccccccggatcggtggaggcctttccacagagcaatgcagttatccaagatgaggaaagagacattcctgaaagatcatggaactcaggctatgactggatcactgatttcccaggtaaaacagtctggtttgttccaagcatcaaatcaggaaatgacattgccaactgtttaagaaagaatgggaaacgggtggtccaattgagcagaaaaacttttgacactgagtaccagaaaacaaaaaataacgactgggactatgttgtcacaacagacatatccgaaatgggagcaaacttccgagccgacagggtaatagacccgaggcggtgcctgaaaccggtaatactaaaagatggcccagagcgtgtcattctagccggaccgatgccagtgactgtggctagcgccgcccagaggagaggaagaattggaaggaaccaaaataaggaaggcgatcagtatatttacatgggacagcctctaaacaatgatgaggaccacgcccattggacagaagcaaaaatgctccttgacaacataaacacaccagaagggattatcccagccctctttgagccggagagagaaaagagtgcagcaatagacggggaatacagactacggggtgaagcgaggaaaacgttcgtggagctcatgagaagaggagatctacctgtctggctatcctacaaagttgcctcagaaggcttccagtactccgacagaaggtggtgctttgatggggaaaggaacaaccaggtgttggaggagaacatggacgtggagatctggacaaaagaaggagaaagaaagaaactacgaccccgctggctggatgccagaacatactctgacccactggctctgcgcgaattcaaagagttcgcagcaggaagaaga

SEQ ID NO: 213 - DNA, 1857 bp, Artificial Sequence
  Codon optimised DNA encoding DENV NS3 protein
tctggcgtgctgtgggatacaccttctccaccagaggtggaaagagccgtgctggacgacggcatctaccggattctgcagagaggactgctgggcagatctcaagttggcgtgggcgtgttccaagaaggggtgttccacaccatgtggcacgtgacaagaggcgccgtgctgatgtaccagggcaagagactggaacctagctgggccagcgtgaagaaggacctgatctcttacggcggaggctggcggtttcaaggctcttggaatgccggcgaagaggtgcaagtgatcgccgtggaacccggcaagaaccccaagaacgttcagacagcccctggcaccttcaagacccctgaaggcgaagtgggagctatcgccctggatttcaagcctggcacaagcggcagccccatcgtgaacagagaaggcaagatcgtgggcctgtacggcaatggcgtggtcaccacatctggcacctacgtgtcagccattgctcaggccaaggcctctcaagagggacccctgcctgagatcgaggacgaggtgttccggaagcggaacctgaccatcatggatctgcaccctggcagcggcaagaccagaagatatctgcccgccattgtgcgcgaggccatccgaagaaatgtgcggacactggtgctggcccctacaagagtggtggcctctgaaatggccgaggctctgaagggcatgcctatcagataccagaccaccgccgtgaagtctgagcacaccggcaaagaaatcgtggacctgatgtgccacgccaccttcaccatgagactgctgagccctgtgcgggtgcccaactacaacatgatcatcatggacgaggcccacttcacagaccccgcctctattgccgccagaggctacatctctaccagagtcggcatgggagaagccgccgctatcttcatgacagccacacctccaggcagcgtggaagcctttcctcagtccaatgccgtgatccaggacgaagagagagacatccccgagcggagctggaacagcggctacgactggatcaccgactttccaggcaagaccgtttggttcgtgcccagcatcaagagcggcaacgatatcgccaactgcctgcggaagaacggcaagagagtggtgcagctgagcagaaagaccttcgacaccgagtaccaaaagaccaagaacaacgactgggactacgtcgtgaccaccgacatctctgagatgggcgccaacttcagggccgacagagtgatcgaccctcggagatgtctgaagcccgtgatcctgaaggacggccctgagagagtgattctggccggacctatgcctgtgacagtggcttctgccgctcagagaagaggccggatcggccggaatcagaacaaagagggcgaccagtacatctacatgggccagcctctgaacaacgatgaggatcacgcccactggaccgaggccaagatgctgctggacaacatcaacacccctgagggcatcatccccgctctgttcgagcccgagagagagaagtctgccgcaatcgacggcgagtacagactgagaggcgaggccagaaagacatttgtggaactgatgcggagaggcgacctgcctgtgtggctgagttacaaggtggccagcgagggcttccagtacagcgatagaagatggtgcttcgatggcgagcggaacaaccaggtgctggaagagaacatggacgtggaaatctggaccaaagaaggcgagcgcaagaaactgcggcccagatggctggatgcccggacatattctgaccctctggctctgcgcgagttcaaagagtttgccgccggaagaaga

SEQ ID NO: 214 - RNA, 1857 nt, Artificial Sequence
  Codon optimised RNA encoding DENV NS3 protein
ucuggcgugcugugggauacaccuucuccaccagagguggaaagagccgugcuggacgacggcaucuaccggauucugcagagaggacugcugggcagaucucaaguuggcgugggcguguuccaagaagggguguuccacaccauguggcacgugacaagaggcgccgugcugauguaccagggcaagagacuggaaccuagcugggccagcgugaagaaggaccugaucucuuacggcggaggcuggcgguuucaaggcucuuggaaugccggcgaagaggugcaagugaucgccguggaacccggcaagaaccccaagaacguucagacagccccuggcaccuucaagaccccugaaggcgaagugggagcuaucgcccuggauuucaagccuggcacaagcggcagccccaucgugaacagagaaggcaagaucgugggccuguacggcaauggcguggucaccacaucuggcaccuacgugucagccauugcucaggccaaggccucucaagagggaccccugccugagaucgaggacgagguguuccggaagcggaaccugaccaucauggaucugcacccuggcagcggcaagaccagaagauaucugcccgccauugugcgcgaggccauccgaagaaaugugcggacacuggugcuggccccuacaagagugguggccucugaaauggccgaggcucugaagggcaugccuaucagauaccagaccaccgccgugaagucugagcacaccggcaaagaaaucguggaccugaugugccacgccaccuucaccaugagacugcugagcccugugcgggugcccaacuacaacaugaucaucauggacgaggcccacuucacagaccccgccucuauugccgccagaggcuacaucucuaccagagucggcaugggagaagccgccgcuaucuucaugacagccacaccuccaggcagcguggaagccuuuccucaguccaaugccgugauccaggacgaagagagagacauccccgagcggagcuggaacagcggcuacgacuggaucaccgacuuuccaggcaagaccguuugguucgugcccagcaucaagagcggcaacgauaucgccaacugccugcggaagaacggcaagagaguggugcagcugagcagaaagaccuucgacaccgaguaccaaaagaccaagaacaacgacugggacuacgucgugaccaccgacaucucugagaugggcgccaacuucagggccgacagagugaucgacccucggagaugucugaagcccgugauccugaaggacggcccugagagagugauucuggccggaccuaugccugugacaguggcuucugccgcucagagaagaggccggaucggccggaaucagaacaaagagggcgaccaguacaucuacaugggccagccucugaacaacgaugaggaucacgcccacuggaccgaggccaagaugcugcuggacaacaucaacaccccugagggcaucauccccgcucuguucgagcccgagagagagaagucugccgcaaucgacggcgaguacagacugagaggcgaggccagaaagacauuuguggaacugaugcggagaggcgaccugccuguguggcugaguuacaagguggccagcgagggcuuccaguacagcgauagaagauggugcuucgauggcgagcggaacaaccaggugcuggaagagaacauggacguggaaaucuggaccaaagaaggcgagcgcaagaaacugcggcccagauggcuggaugcccggacauauucugacccucuggcucugcgcgaguucaaagaguuugccgccggaagaaga

SEQ ID NO: 215 - protein, 183 aa, Enterovirus 71
GPSLDFALSLLRRNVRQVQTDQGHFTMLGVRDRLAVLPRHSQPGKTIWIEHKLVNVLDAVELVDEQGVNLELTLITLDTNEKFRDITKFIPENISTASDATLVINTEHMPSMFVPVGDVVQYGFLNLSGKPTHRTMMYNFPTKAGQCGGVVTSVGKVIGIHIGGNGRQGFCAGLKRSYFASEQ

SEQ ID NO: 216 - DNA, 549 bp, Enterovirus 71
ggcccgagccttgattttgctctctccctactgaggaggaacgtcaggcaagtccaaacagaccaggggcatttcaccatgttgggtgttagggatcgcttagcagtcctcccacgccactcacaacccggcaaaactatttggattgagcacaaactcgtgaacgtccttgatgcagttgaattggtggatgagcaaggagtcaacctggaattaaccctcatcactcttgataccaacgagaagtttagggatatcaccaaattcatcccggaaaatattagcactgctagtgatgccaccctagtgatcaacacggagcacatgccctcgatgtttgtcccggtgggtgacgttgtgcagtatggtttcctgaatctcagtggtaagcctactcatcgcaccatgatgtacaactttcctactaaggcagggcaatgtggaggggtggtgacatcagttggaaaagtcatcggtatacacataggtggcaacggtagacaaggattttgtgcaggtcttaagagaagctactttgccagcgagcaa

SEQ ID NO: 217 - DNA, 549 bp, Artificial Sequence
  Codon optimised DNA encoding EV71 3Cpro protein
ggcccttctctggattttgccctgagcctgctgcggagaaatgtgcgccaggtgcagacagatcagggccactttacaatgctgggcgtcagagacagactggccgtgctgcctagacactctcagcctggcaagaccatctggatcgagcacaagctggtcaacgtgctggacgccgtggaactggttgatgagcagggcgtgaacctggaactgaccctgatcaccctggacaccaacgagaagttccgggacatcaccaagttcatccccgagaacatcagcaccgccagcgacgccacactggtcatcaataccgagcacatgcccagcatgttcgtgcctgtgggagatgtggtgcagtacggcttcctgaacctgagcggcaagcccacacaccggaccatgatgtacaacttccctaccaaggccggccagtgcggcggagtggttacatctgtgggcaaagtgatcggcatccacatcggcggcaatggcagacagggattttgtgccggcctgaagagaagctacttcgcctctgaacag

SEQ ID NO: 218 - RNA, 549 nt, Artificial Sequence
  Codon optimised RNA encoding EV71 3Cpro protein
ggcccuucucuggauuuugcccugagccugcugcggagaaaugugcgccaggugcagacagaucagggccacuuuacaaugcugggcgucagagacagacuggccgugcugccuagacacucucagccuggcaagaccaucuggaucgagcacaagcuggucaacgugcuggacgccguggaacugguugaugagcagggcgugaaccuggaacugacccugaucacccuggacaccaacgagaaguuccgggacaucaccaaguucauccccgagaacaucagcaccgccagcgacgccacacuggucaucaauaccgagcacaugcccagcauguucgugccugugggagauguggugcaguacggcuuccugaaccugagcggcaagcccacacaccggaccaugauguacaacuucccuaccaaggccggccagugcggcggagugguuacaucugugggcaaagugaucggcauccacaucggcggcaauggcagacagggauuuugugccggccugaagagaagcuacuucgccucugaacag

SEQ ID NO: 219 - protein, 201 aa, Foot-and-mouth disease virus
MHTTDCFIALVHAIREIRALFLPRTTGKMELTLHNGEKKTFYSRPNNHDNCWLNTILQLFRYVDEPFFDWVYNSPENLTLEAINQLEELTGLELHEGGPPALVIWNIKHLLHTGIGTASRPSEVCMVDGTDMCLADFHAGIFLKGQEHAVFACVTSNGWYAIDDEEFYPWTPDPSDVLVFVPYDQEPLNGDWKAMVQRKLK

SEQ ID NO: 220 - DNA, 603 bp, Foot-and-mouth disease virus
atgcatacaactgactgttttatcgctttggtgcacgctatcagagagatcagagcactttttctaccacgaaccacaggaaagatggaactcaccctgcacaacggcgagaaaaagactttttactctagacccaacaaccacgacaactgctggttgaacaccatccttcagttgttcaggtatgtcgatgaacccttcttcgactgggtctacaactcgcccgagaacctcacgcttgaagccatcaaccaattggaggaactcacaggacttgagttgcacgagggcggaccgcctgcccttgtgatctggaacatcaaacacttgctccacaccggcatcggcaccgcctcacgacccagtgaggtgtgtatggtggacggcacggacatgtgtcttgctgacttccacgcaggcattttcctgaagggacaggaacacgcagtctttgcgtgtgtcacctccaacgggtggtacgcgattgacgacgaggaattttacccctggacgcctgacccgtcagacgtcctggtgtttgtcccgtacgatcaagaaccactcaacggggactggaaagcgatggttcagaggaagcttaag

SEQ ID NO: 221 - DNA, 603 bp, Artificial Sequence
  Codon optimised DNA encoding FMDV Lpro protein
atgcacaccaccgactgctttatcgccctggtgcacgccatcagagagatcagagccctgttcctgcctcggaccaccggcaagatggaactgacactgcacaacggcgagaagaaaaccttctacagcagacccaacaaccacgacaactgctggctgaacaccatcctgcagctgttcagatacgtggacgagcccttcttcgactgggtgtacaacagccccgagaatctgaccctggaagccatcaaccagctggaagaactgaccggcctggaactgcatgaaggcggacctccagctctggtcatctggaacatcaaacatctgctgcacaccggcatcggcaccgcctctagaccatctgaagtgtgcatggtggacggcaccgatatgtgcctggccgattttcacgccggcatctttctgaagggccaagagcatgccgtgttcgcctgcgtgacaagcaatggatggtacgccatcgacgacgaggaattctacccctggacacccgatcctagcgacgtgctggtgttcgtgccctacgatcaagagcccctgaacggcgattggaaggccatggtgcagcggaagctgaag

SEQ ID NO: 222 - RNA, 603 nt, Artificial Sequence
  Codon optimised RNA encoding FMDV Lpro protein
augcacaccaccgacugcuuuaucgcccuggugcacgccaucagagagaucagagcccuguuccugccucggaccaccggcaagauggaacugacacugcacaacggcgagaagaaaaccuucuacagcagacccaacaaccacgacaacugcuggcugaacaccauccugcagcuguucagauacguggacgagcccuucuucgacuggguguacaacagccccgagaaucugacccuggaagccaucaaccagcuggaagaacugaccggccuggaacugcaugaaggcggaccuccagcucuggucaucuggaacaucaaacaucugcugcacaccggcaucggcaccgccucuagaccaucugaagugugcaugguggacggcaccgauaugugccuggccgauuuucacgccggcaucuuucugaagggccaagagcaugccguguucgccugcgugacaagcaauggaugguacgccaucgacgacgaggaauucuaccccuggacacccgauccuagcgacgugcugguguucgugcccuacgaucaagagccccugaacggcgauuggaaggccauggugcagcggaagcugaag

SEQ ID NO: 223 - protein, 213 aa, Foot-and-mouth disease virus
SGAPPTDLQKMVMGNTKPVELILDGKTVAICCATGVFGTAYLVPRHLFAEKYDKIMLDGRAMTDSDYRVFEFEIKVKGQDMLSDAALMVLHRGNRVRDITKHFRDTARMKKGTPVVGVINNADVGRLIFSGEALTYKDIVVCMDGDTMPGLFAYRAATKAGYCGGAVLAKDGADTFIVGTHSAGGNGVGYCSCVSRSMLLKMKAHIDPEPHHE

SEQ ID NO: 224 - DNA, 639 bp, Foot-and-mouth disease virus
agtggtgcccccccgaccgacttgcaaaagatggtcatgggcaacacaaagcctgttgagctcatcctcgacgggaagacagtagccatctgctgtgctactggagtgtttggcactgcctacctcgtgcctcgtcatcttttcgctgagaagtatgacaagatcatgttggacggcagagccatgacagacagtgactacagagtgtttgagttcgagatcaaagtaaaaggacaggacatgctctcagacgccgcactcatggtgctccaccgtgggaaccgcgtgagagacatcacgaagcactttcgtgacacagcaagaatgaagaaaggcacccccgttgtcggcgtgatcaacaatgccgatgtcgggagactgattttctctggcgaagcccttacctacaaagacattgtagtgtgcatggacggagacaccatgcccgggctttttgcctacagagccgccactaaggcaggctactgcgggggagccgttctcgctaaggacggggctgacactttcatcgttggcactcactctgcaggaggtaatggagttggatactgctcatgcgtttccaggtccatgcttctcaagatgaaggcacacattgaccctgagccgcaccacgag

SEQ ID NO: 225 - DNA, 639 bp, Artificial Sequence
  Codon optimised DNA encoding FMDV 3Cpro protein
tctggtgcccctcctaccgacctgcagaaaatggtcatgggcaacaccaagcctgtggaactgatcctggacggcaagaccgtggccatctgttgtgcaacaggcgtgttcggcaccgcctacctggttcctagacacctgttcgccgagaagtacgacaagatcatgctggatggcagagccatgaccgacagcgactaccgggtgttcgagttcgagatcaaagtgaaaggccaggacatgctgagcgacgccgctctgatggttctgcacagaggcaacagagtgcgggacatcaccaagcacttccgggacaccgccagaatgaagaaaggcacacctgtcgtgggcgtgatcaacaacgctgacgtgggcagactgatcttctctggcgaggccctgacctacaaggacatcgtcgtgtgcatggacggcgacacaatgcctggcctgtttgcctatagagccgccacaaaggccggctactgtggcggagctgtgctggctaaagatggcgccgataccttcatcgtgggcacacattctgccggcggaaatggcgtgggctactgctcttgtgtgtccagatccatgctgctgaagatgaaggcccacatcgaccccgagcctcaccatgaa

SEQ ID NO: 226 - RNA, 639 nt, Artificial Sequence
  Codon optimised RNA encoding FMDV 3Cpro protein
ucuggugccccuccuaccgaccugcagaaaauggucaugggcaacaccaagccuguggaacugauccuggacggcaagaccguggccaucuguugugcaacaggcguguucggcaccgccuaccugguuccuagacaccuguucgccgagaaguacgacaagaucaugcuggauggcagagccaugaccgacagcgacuaccggguguucgaguucgagaucaaagugaaaggccaggacaugcugagcgacgccgcucugaugguucugcacagaggcaacagagugcgggacaucaccaagcacuuccgggacaccgccagaaugaagaaaggcacaccugucgugggcgugaucaacaacgcugacgugggcagacugaucuucucuggcgaggcccugaccuacaaggacaucgucgugugcauggacggcgacacaaugccuggccuguuugccuauagagccgccacaaaggccggcuacuguggcggagcugugcuggcuaaagauggcgccgauaccuucaucgugggcacacauucugccggcggaaauggcgugggcuacugcucuuguguguccagauccaugcugcugaagaugaaggcccacaucgaccccgagccucaccaugaa

SEQ ID NO: 227 - protein, 316 aa, Toscana virus
MQSRAVILKYRSGSGHKRSLPRFYIDCDLDTFDFEKDCSLIENEFPIYINNYKVVYKSKPTLSHFLIEKEFPAVLGPGMISAVRTRLYEPTMRELYQESIHQLKRSNKKYLLSALRWPTGIPTLEFIDYYFEELLFLSEFDPGSIQRYLKLLVKASGLYNSTNEEQIVEIHRRVLIEGKKHGLTAFDLPGNDILGDICVVQAARVTRLVAKTFSKMTRDTHLMIYFSISPVELVLSKLDKKGDKRAKAKGLMSMSAARSYDYFMRTDLGFRETALSTFWAKDWPTPQETILSDKRCLKEDMRVTKWLPSPPHYPPL

SEQ ID NO: 228 - DNA, 948 bp, Toscana virus
atgcaatccagagctgtcatcttgaagtatagatctggttcaggccacaagaggtctttgcccaggttctacatagactgtgatttggacacctttgattttgagaaggattgctctctgattgagaatgagttccccatttacataaacaattataaggtggtctataagtcaaagccaactctctcacatttcctcattgagaaggagtttcctgctgtgctggggcctggtatgatcagtgcagttcgaaccagactttacgagccaactatgagagagctctaccaggaatcgattcaccaactaaagaggagcaacaagaaataccttttgtctgctctcaggtggcccacagggattcctactctagagtttatagactattacttcgaggagctcctgttcttgtcagagtttgacccggggtctatccagagatacctgaaattactggttaaggcctctgggctttacaactccactaatgaggagcagatagtggagattcacagacgagtgctcatagaaggcaaaaagcacggattgactgcttttgatctcccaggaaatgacatccttggagacatctgtgtggtccaagcagcacgggtgacaagactggttgctaagacattctctaagatgaccagagacacccatctgatgatatacttctcgataagcccagttgagttggttttgagtaaacttgataagaaaggggacaagagggctaaagcaaaagggttgatgtctatgagtgccgctaggtcttatgactattttatgagaactgacttgggattcagagagactgctctttccaccttttgggctaaggactggcctaccccacaagagaccattctatctgacaaacgatgccttaaagaagacatgagagtgacaaagtggctgcctagtcccccccactacccaccctta

SEQ ID NO: 229 - DNA, 948 bp, Artificial Sequence
  Codon optimised DNA encoding Toscana virus NSS protein
atgcagagcagagccgtgatcctgaagtacagaagcggcagcggccacaagagaagcctgcctagattctacatcgactgcgacctggacaccttcgacttcgagaaggactgcagcctgatcgagaacgagttccccatctacatcaacaactacaaggtggtgtacaagagcaagccaactctgagccacttcctcatcgagaaagaattccctgccgtgctcggccctggcatgatctctgccgttagaaccagactgtacgagcccaccatgagagagctgtaccaagagagcatccaccagctgaagcggagcaacaagaagtacctgctgagcgccctgagatggcccacaggcattcccacactggaattcatcgactactacttcgaggaactgctgttcctgagcgagttcgaccctggcagcatccagagatacctgaagctgctggtcaaggccagcggcctgtacaacagcaccaacgaggaacagatcgtggaaatccaccggcgggtgctgatcgagggaaagaagcacggactgaccgccttcgacctgcctggcaatgatatcctgggcgacatctgcgtggtgcaggccgctagagtgacaagactggtggccaagaccttcagcaagatgaccagagacacccacctgatgatctacttcagcatcagccccgtggaactggtgctgagcaagctggacaagaagggcgacaagagagccaaggccaagggcctgatgagcatgtctgccgccagatcctacgactacttcatgagaaccgacctgggcttcagagagacagccctgagcaccttctgggccaaagactggcccacacctcaagagacaatcctgtccgacaagcggtgcctgaaagaagatatgcgggtcaccaagtggctgccctctccacctcattaccctccactt

SEQ ID NO: 230 - RNA, 948 nt, Artificial Sequence
  Codon optimised RNA encoding Toscana virus NSS protein
augcagagcagagccgugauccugaaguacagaagcggcagcggccacaagagaagccugccuagauucuacaucgacugcgaccuggacaccuucgacuucgagaaggacugcagccugaucgagaacgaguuccccaucuacaucaacaacuacaaggugguguacaagagcaagccaacucugagccacuuccucaucgagaaagaauucccugccgugcucggcccuggcaugaucucugccguuagaaccagacuguacgagcccaccaugagagagcuguaccaagagagcauccaccagcugaagcggagcaacaagaaguaccugcugagcgcccugagauggcccacaggcauucccacacuggaauucaucgacuacuacuucgaggaacugcuguuccugagcgaguucgacccuggcagcauccagagauaccugaagcugcuggucaaggccagcggccuguacaacagcaccaacgaggaacagaucguggaaauccaccggcgggugcugaucgagggaaagaagcacggacugaccgccuucgaccugccuggcaaugauauccugggcgacaucugcguggugcaggccgcuagagugacaagacugguggccaagaccuucagcaagaugaccagagacacccaccugaugaucuacuucagcaucagccccguggaacuggugcugagcaagcuggacaagaagggcgacaagagagccaaggccaagggccugaugagcaugucugccgccagauccuacgacuacuucaugagaaccgaccugggcuucagagagacagcccugagcaccuucugggccaaagacuggcccacaccucaagagacaauccuguccgacaagcggugccugaaagaagauaugcgggucaccaaguggcugcccucuccaccucauuacccuccacuu

SEQ ID NO: 231 - protein, 230 aa, Influenza A virus
MDPNTVSSFQVDCFLWHVRKRVADQELGDAPFLDRLRRDQKSLRGRGSTLGLDIETATRAGKQIVERILKEESDEALKMTMASVPASRYLTDMTLEEMSREWSMLIPKQKVAGPLCIRMDQAIMDKNIILKANFSVIFDRLETLILLRAFTEEGAIVGEISPLPSLPGHTAEDVKNAVGVLIGGLEWNDNTVRVSETLQRFAWRSSNENGRPPLTPKQKREMAGTIRSEV

SEQ ID NO: 232 - DNA, 693 bp, Influenza A virus
atggatccaaacactgtgtcaagctttcaggtagattgctttctttggcatgtccgcaaacgagttgcagaccaagaactaggtgatgccccattccttgatcggcttcgccgagatcagaaatccctaagaggaaggggcagcactcttggtctggacatcgagacagccacacgtgctggaaagcagatagtggagcggattctgaaagaagaatccgatgaggcacttaaaatgaccatggcctctgtacctgcgtcgcgttacctaaccgacatgactcttgaggaaatgtcaagggaatggtccatgctcatacccaagcagaaagtggcaggccctctttgtatcagaatggaccaggcgatcatggataaaaacatcatactgaaagcgaacttcagtgtgatttttgaccggctggagactctaatattgctaagggctttcaccgaagagggagcaattgttggcgaaatttcaccattgccttctcttccaggacatactgctgaggatgtcaaaaatgcagttggagtcctcatcggaggacttgaatggaatgataacacagttcgagtctctgaaactctacagagattcgcttggagaagcagtaatgagaatgggagacctccactcactccaaaacagaaacgagaaatggcgggaacaattaggtcagaagtttga

SEQ ID NO: 233 - DNA, 693 bp, Artificial Sequence
  Codon optimised DNA encoding Influenza A Non-structural protein 1
atggaccccaataccgtcagcagcttccaggtggactgcttcctgtggcacgtgcggaaaagagtggccgatcaagaactgggcgacgccccattcctggacagactgagaagagatcagaagtccctgagaggcagaggcagcacactgggcctcgacattgagacagccacaagagccggcaagcagatcgtggaacggatcctgaaagaggaaagcgacgaggccctgaagatgaccatggcctctgtgcctgccagcagatacctgaccgacatgaccctggaagagatgagccgcgagtggtccatgctgatccccaagcagaaagtggccggacctctgtgcatcagaatggatcaggccatcatggacaagaacatcatcctgaaggccaacttcagcgtgatcttcgaccggctggaaaccctgatcctgctgagagcctttaccgaagagggcgccatcgtgggagagatcagtcctctgccttctctgcctggacacaccgccgaggatgtgaagaatgctgtgggcgtgctgatcggcggcctggaatggaacgataacaccgtcagagtgtccgagacactgcagagatttgcctggcggagcagcaacgagaacggcagacctcctctgacacctaagcagaaaagagagatggccggcaccatccgcagcgaagtgtaa

SEQ ID NO: 234 - RNA, 693 nt, Artificial Sequence
  Codon optimised RNA encoding Influenza A Non-structural protein 1
auggaccccaauaccgucagcagcuuccagguggacugcuuccuguggcacgugcggaaaagaguggccgaucaagaacugggcgacgccccauuccuggacagacugagaagagaucagaagucccugagaggcagaggcagcacacugggccucgacauugagacagccacaagagccggcaagcagaucguggaacggauccugaaagaggaaagcgacgaggcccugaagaugaccauggccucugugccugccagcagauaccugaccgacaugacccuggaagagaugagccgcgagugguccaugcugauccccaagcagaaaguggccggaccucugugcaucagaauggaucaggccaucauggacaagaacaucauccugaaggccaacuucagcgugaucuucgaccggcuggaaacccugauccugcugagagccuuuaccgaagagggcgccaucgugggagagaucaguccucugccuucucugccuggacacaccgccgaggaugugaagaaugcugugggcgugcugaucggcggccuggaauggaacgauaacaccgucagaguguccgagacacugcagagauuugccuggcggagcagcaacgagaacggcagaccuccucugacaccuaagcagaaaagagagauggccggcaccauccgcagcgaaguguaa

SEQ ID NO: 235 - protein, 422 aa, Severe acute respiratory syndrome coronavirus 2
MSDNGPQSNQRSAPRITFGGPTDSTDNNQNGGRNGARPKQRRPQGLPNNTASWFTALTQHGKEELRFPRGQGVPINTNSGPDDQIGYYRRATRRVRGGDGKMKELSPRWYFYYLGTGPEASLPYGANKEGIVWVATEGALNTPKDHIGTRNPNNNAATVLQLPQGTTLPKGFYAEGSRGGSQASSRSSSRSRGNSRNSTPGSSRGNSPARMASGGGETALALLLLDRLNQLESKVSGKGQQQQGQTVTKKSAAEASKKPRQKRTATKQYNVTQAFGRRGPEQTQGNFGDQDLIRQGTDYKHWPQIAQFAPSASAFFGMSRIGMEVTPSGTWLTYHGAIKLDDKDPQFKDNVILLNKHIDAYKTFPPTEPKKDKKKKTDEAQPLPQRQKKQPTVTLLPAADMDDFSRQLQNSMSGASADSTQA

SEQ ID NO: 236 - DNA, 1266 bp, Severe acute respiratory syndrome coronavirus 2
atgtctgataatggaccccaatcaaaccaacgtagtgccccccgcattacatttggtggacccacagattcaactgacaataaccagaatggaggacgcaatggggcaaggccaaaacagcgccgaccccaaggtttacccaataatactgcgtcttggttcacagctctcactcagcatggcaaggaggaacttagattccctcgaggccagggcgttccaatcaacaccaatagtggtccagatgaccaaattggctactaccgaagagctacccgacgagttcgtggtggtgacggcaaaatgaaagagctcagccccagatggtacttctattacctaggaactggcccagaagcttcacttccctacggcgctaacaaagaaggcatcgtatgggttgcaactgagggagccttgaatacacccaaagaccacattggcacccgcaatcctaataacaatgctgccaccgtgctacaacttcctcaaggaacaacattgccaaaaggcttctacgcagagggaagcagaggcggcagtcaagcctcttctcgctcctcatcacgtagtcgcggtaattcaagaaattcaactcctggcagcagtaggggaaattctcctgctcgaatggctagcggaggtggtgaaactgccctcgcgctattgctgctagacagattgaaccagcttgagagcaaagtttctggtaaaggccaacaacaacaaggccaaactgtcactaagaaatctgctgctgaggcatctaaaaagcctcgccaaaaacgtactgccacaaaacagtacaacgtcactcaagcatttgggagacgtggtccagaacaaacccaaggaaatttcggggaccaagacctaatcagacaaggaactgattacaaacattggccgcaaattgcacaatttgctccaagtgcctctgcattctttggaatgtcacgcattggcatggaagtcacaccttcgggaacatggctgacttatcatggagccattaaattggatgacaaagatccacaattcaaagacaacgtcatactgctgaacaagcacattgacgcatacaaaacattcccaccaacagagcctaaaaaggacaaaaagaaaaagactgatgaagctcagcctttgccgcagagacaaaagaagcagcccactgtgactcttcttcctgcggctgacatggatgatttctccagacaacttcaaaattccatgagtggagcttctgctgattcaactcaggca

SEQ ID NO: 237 - DNA, 1266 bp, Artificial Sequence
  Codon optimised DNA encoding SARS CoV N protein
atgagcgacaatggccctcagagcaaccagagaagcgcccctagaatcacctttggcggccctaccgacagcaccgacaacaaccagaacggcggcagaaatggcgccagacctaagcagagaaggcctcagggcctgcctaacaataccgccagctggttcacagccctgacacagcacggcaaagaggaactgagattccccagaggacagggcgtgcccatcaacacaaatagcggccctgacgaccagatcggctactacagacgggccaccagaagagttagaggcggcgacggcaagatgaaggaactgtcccctcggtggtacttctactacctcggcacaggacccgaagccagccttccttatggcgccaacaaagagggcatcgtctgggttgcaacagaaggcgccctgaacacccctaaggaccacatcggcaccagaaatcccaacaacaacgccgccacagtgctgcagttgccacagggaacaacactgcccaagggcttctacgccgagggatctagaggcggatctcaggccagcagcagaagcagctctagaagcagaggcaacagccggaatagcacccctggcagctccagaggcaattcccctgccagaatggcttctggcggcggagaaacagctctggcactgctgctgctcgaccggctgaatcagctggaatctaaggtgtccggcaagggccagcaacagcagggacagaccgtgaccaagaagtctgccgctgaggccagcaagaagcccagacagaagagaaccgccaccaagcagtacaacgtgacccaggcctttggcagaagaggcccagaacagacccagggcaatttcggcgaccaggacctgatcagacagggcaccgattacaagcactggccccagatcgcccagtttgccccttctgcctctgcctttttcggcatgagccggatcggcatggaagtgacacctagcggcacctggctgacatatcacggcgccatcaagctggacgacaaggaccctcagttcaaggacaacgtgatcctgctgaacaagcacatcgacgcctacaagacattccctccaaccgagcctaagaaggacaagaagaagaaaaccgacgaggcccagcctctgccacagagacagaaaaagcagcccaccgtgacactgctgcctgccgccgatatggacgacttctctagacagctgcagaacagcatgagcggcgccagcgctgattctacacaagct

SEQ ID NO: 238 - RNA, 1266 nt, Artificial Sequence
  Codon optimised RNA encoding SARS CoV N protein
augagcgacaauggcccucagagcaaccagagaagcgccccuagaaucaccuuuggcggcccuaccgacagcaccgacaacaaccagaacggcggcagaaauggcgccagaccuaagcagagaaggccucagggccugccuaacaauaccgccagcugguucacagcccugacacagcacggcaaagaggaacugagauuccccagaggacagggcgugcccaucaacacaaauagcggcccugacgaccagaucggcuacuacagacgggccaccagaagaguuagaggcggcgacggcaagaugaaggaacuguccccucggugguacuucuacuaccucggcacaggacccgaagccagccuuccuuauggcgccaacaaagagggcaucgucuggguugcaacagaaggcgcccugaacaccccuaaggaccacaucggcaccagaaaucccaacaacaacgccgccacagugcugcaguugccacagggaacaacacugcccaagggcuucuacgccgagggaucuagaggcggaucucaggccagcagcagaagcagcucuagaagcagaggcaacagccggaauagcaccccuggcagcuccagaggcaauuccccugccagaauggcuucuggcggcggagaaacagcucuggcacugcugcugcucgaccggcugaaucagcuggaaucuaagguguccggcaagggccagcaacagcagggacagaccgugaccaagaagucugccgcugaggccagcaagaagcccagacagaagagaaccgccaccaagcaguacaacgugacccaggccuuuggcagaagaggcccagaacagacccagggcaauuucggcgaccaggaccugaucagacagggcaccgauuacaagcacuggccccagaucgcccaguuugccccuucugccucugccuuuuucggcaugagccggaucggcauggaagugacaccuagcggcaccuggcugacauaucacggcgccaucaagcuggacgacaaggacccucaguucaaggacaacgugauccugcugaacaagcacaucgacgccuacaagacauucccuccaaccgagccuaagaaggacaagaagaagaaaaccgacgaggcccagccucugccacagagacagaaaaagcagcccaccgugacacugcugccugccgccgauauggacgacuucucuagacagcugcagaacagcaugagcggcgccagcgcugauucuacacaagcu

SEQ ID NO: 239 - protein, 454 aa, Murine coronavirus
MSFVPGQENAGGRSSSVNRAGNGILKKTTWADQTERGPNNQNRGRRNQPKQTATTQPNSGSVVPHYSWFSGITQFQKGKEFQFAEGQGVPIANGIPASEQKGYWYRHNRRSFKTPDGQQKQLLPRWYFYYLGTGPHAGASYGDSIEGVFWVANSQADTNTRSDIVERDPSSHEAIPTRFAPGTVLPQGFYVEGSGRSAPASRSGSRSQSRGPNNRARSSSNQRQPASTVKPDMAEEIAALVLAKLGKDAGQPKQVTKQSAKEVRQKILNKPRQKRTPNKQCPVQQCFGKRGPNQNFGGSEMLKLGTSDPQFPILAELAPTVGAFFFGSKLELVKKNSGGADEPTKDVYELQYSGAVRFDSTLPGFETIMKVLNENLNAYQKDGGADVVSPKPQRKGRRQAQEKKDEVDNVSVAKPKSSVQRNVSRELTPEDRSLLAQILDDGVVPDGLEDDSNV

SEQ ID NO: 240 - DNA, 1362 bp, Murine coronavirus
atgtcttttgttcctgggcaagaaaatgccggtggcagaagctcctctgtaaaccgcgctggtaatggaatcctcaagaagaccacttgggctgaccaaaccgagcgtggaccaaataatcaaaatagaggcagaaggaatcagccaaagcagactgcaactactcaacccaactccgggagtgtggttccccattactcctggttttctggcattacccagttccaaaagggaaaggagtttcagtttgcagaaggacaaggagtgcctattgccaatggaatccccgcttcagagcaaaagggatattggtatagacacaaccgccgttcttttaaaacacctgatgggcagcagaagcaattactgcccagatggtatttttactatcttggcacagggccccatgctggagccagttatggagacagcattgaaggtgtcttctgggttgcaaacagccaagcggacaccaatacccgctctgatattgtcgaaagggacccaagcagtcatgaggctattcctactaggtttgcgcccggcacggtattgcctcagggcttttatgttgaaggctctggaaggtctgcacctgctagccgatctggttcgcggtcacaatcccgtgggccaaataatcgcgctagaagcagttccaaccagcgccagcctgcctctactgtaaaacctgatatggccgaagaaattgctgctcttgttttggctaagctcggtaaagatgccggccagcccaagcaagtaacgaagcaaagtgccaaagaagtcaggcagaaaattttaaacaagcctcgccaaaagaggactccaaacaagcagtgcccagtgcagcagtgttttggaaagagaggccccaatcagaattttggaggctctgaaatgttaaaacttggaactagtgatccacagttccccattcttgcagagttggctccaacagttggtgccttcttctttggatctaaattagaattggtcaaaaagaattctggtggtgctgatgaacccaccaaagatgtgtatgagctgcaatattcaggtgcagttagatttgatagtactctacctggttttgagactatcatgaaagtgttgaatgagaatttgaatgcctaccagaaggatggtggtgcagatgtggtgagcccaaagccccaaagaaaagggcgtagacaggctcaggaaaagaaagatgaagtagataatgtaagcgttgcaaagcccaaaagctctgtgcagcgaaatgtaagtagagaattaaccccagaggatagaagtctgttggctcagatccttgatgatggcgtagtgccagatgggttagaagatgactctaatgtg

SEQ ID NO: 241 - DNA, 1362 bp, Artificial Sequence
  Codon optimised DNA encoding MHV N protein
atgagcttcgtgcccggccaagaaaatgccggcggaagatctagcagcgtgaacagagccggcaacggcatcctgaagaaaaccacctgggccgaccagaccgagagaggccccaacaaccagaaccggggcagaagaaaccagcctaagcagaccgccaccacacagcctaatagcggctctgtggtgccccactacagctggtttagcggcatcacccagttccagaagggcaaagagttccagttcgccgaaggacagggcgtgccaatcgccaatggaatccctgcctctgagcagaaaggctactggtacagacacaaccggcggagcttcaagacccctgatggacagcagaaacagctgctgcccagatggtacttctactacctcggcacaggacctcacgcaggcgcctcttatggcgattctatcgagggcgtgttctgggtcgccaacagccaggccgataccaacaccagatccgacatcgtggaacgggaccctagcagccacgaggccattcctacaagatttgcccctggcaccgtgctgcctcagggcttttatgtggaaggcagcggaagaagcgcccctgccagtagatctggcagcagatctcagagcaggggccctaacaacagagccagaagcagcagcaaccagagacagcctgccagcaccgtgaagcccgatatggccgaagaaatcgccgctctggtgctggccaagctgggaaaagatgccggccagccaaagcaagtgaccaagcagagcgccaaagaagtgcggcagaagatcctgaacaagccccggcagaagcggacccctaacaagcagtgtcctgtgcagcagtgcttcggcaagaggggccccaatcagaattttggcggcagcgagatgctgaagctgggcacaagcgatcctcagttccctatcctggccgagctggctcctacagtgggcgcatttttctttggctccaaactcgagctggtcaagaagaacagcggcggagccgatgagcccaccaaggatgtgtacgagctgcagtactctggcgccgtcagattcgatagcaccctgcctggcttcgagacaatcatgaaggtgctgaacgagaacctgaacgcctaccagaaggatggcggcgctgacgtggtgtctcctaagcctcagagaaaaggcagacggcaggcccaagagaagaaagacgaggtggacaacgtgtccgtggccaagcctaagagcagcgtgcagagaaacgtgtccagagagctgaccccagaggacagatctctgctggctcagatcctggacgatggcgtggtgccagatggcctggaagatgacagcaacgtg

SEQ ID NO: 242 - RNA, 1362 nt, Artificial Sequence
  Codon optimised RNA encoding MHV N protein
augagcuucgugcccggccaagaaaaugccggcggaagaucuagcagcgugaacagagccggcaacggcauccugaagaaaaccaccugggccgaccagaccgagagaggccccaacaaccagaaccggggcagaagaaaccagccuaagcagaccgccaccacacagccuaauagcggcucuguggugccccacuacagcugguuuagcggcaucacccaguuccagaagggcaaagaguuccaguucgccgaaggacagggcgugccaaucgccaauggaaucccugccucugagcagaaaggcuacugguacagacacaaccggcggagcuucaagaccccugauggacagcagaaacagcugcugcccagaugguacuucuacuaccucggcacaggaccucacgcaggcgccucuuauggcgauucuaucgagggcguguucugggucgccaacagccaggccgauaccaacaccagauccgacaucguggaacgggacccuagcagccacgaggccauuccuacaagauuugccccuggcaccgugcugccucagggcuuuuauguggaaggcagcggaagaagcgccccugccaguagaucuggcagcagaucucagagcaggggcccuaacaacagagccagaagcagcagcaaccagagacagccugccagcaccgugaagcccgauauggccgaagaaaucgccgcucuggugcuggccaagcugggaaaagaugccggccagccaaagcaagugaccaagcagagcgccaaagaagugcggcagaagauccugaacaagccccggcagaagcggaccccuaacaagcaguguccugugcagcagugcuucggcaagaggggccccaaucagaauuuuggcggcagcgagaugcugaagcugggcacaagcgauccucaguucccuauccuggccgagcuggcuccuacagugggcgcauuuuucuuuggcuccaaacucgagcuggucaagaagaacagcggcggagccgaugagcccaccaaggauguguacgagcugcaguacucuggcgccgucagauucgauagcacccugccuggcuucgagacaaucaugaaggugcugaacgagaaccugaacgccuaccagaaggauggcggcgcugacguggugucuccuaagccucagagaaaaggcagacggcaggcccaagagaagaaagacgagguggacaacguguccguggccaagccuaagagcagcgugcagagaaacguguccagagagcugaccccagaggacagaucucugcuggcucagauccuggacgauggcguggugccagauggccuggaagaugacagcaacgug

SEQ ID NO: 243 - protein, 154 aa, Foot-and-mouth disease virus
PFFFSDVRSNFSKLVETINQMQEDMSTKHGPDFNRLVSAFEELAAGVKAIRTGLDEAKPWYKLIKLLSRLSCMAAVAARSKDPVLVAIMLADTGLEILDSTFVVKKISDSLSSLFHVPAPVFSFGAPILLAGLVKVASSFFRSTPEDLERAEKQ

SEQ ID NO: 244 - DNA, 462 bp, Foot-and-mouth disease virus
cccttcttcttctctgacgttaggtcaaacttttctaagctggtggaaaccatcaaccagatgcaggaagacatgtcaacaaaacacgggcccgactttaaccggttggtgtccgcctttgaggaactggccgctggagtaaaagccatcaggaccggcctcgacgaggccaaaccctggtacaagcttatcaaactcctaagccgcctgtcgtgcatggccgctgtggcagcacggtccaaggacccagtccttgtggccatcatgctggccgacaccggtctcgagattctggacagcactttcgtcgtgaagaagatctccgactcgctctccagtctcttccacgtgccggcccccgtcttcagtttcggagccccgattctgctagccgggctggtcaaggtcgcctcgagtttcttccggtccacgcccgaagaccttgagagagcagagaaacag

SEQ ID NO: 245 - DNA, 462 bp, Artificial Sequence
  Codon optimised DNA encoding FMDV 2B protein
ccgttcttctttagcgacgtgcggagcaacttcagcaagctggtggaaaccatcaaccagatgcaagaggacatgagcaccaagcacggccccgacttcaacagactggtgtccgcctttgaggaactggccgctggcgtgaaggccatcagaacaggactggatgaggccaagccttggtacaagctgatcaagctgctgagccggctgagctgtatggctgctgtggccgccagatccaaggatcctgtgctggtggccatcatgctggccgatacaggcctggaaatcctggacagcaccttcgtggtcaagaagatcagcgacagcctgagcagcctgttccacgtgccagctccagtgttctcttttggcgcccctattctgctggccggcctggtcaaagtggccagcagcttctttagaagcacccctgaggacctggaacgggccgaaaaacaa

SEQ ID NO: 246 - RNA, 462 nt, Artificial Sequence
  Codon optimised RNA encoding FMDV 2B protein
ccguucuucuuuagcgacgugcggagcaacuucagcaagcugguggaaaccaucaaccagaugcaagaggacaugagcaccaagcacggccccgacuucaacagacugguguccgccuuugaggaacuggccgcuggcgugaaggccaucagaacaggacuggaugaggccaagccuugguacaagcugaucaagcugcugagccggcugagcuguauggcugcuguggccgccagauccaaggauccugugcugguggccaucaugcuggccgauacaggccuggaaauccuggacagcaccuucguggucaagaagaucagcgacagccugagcagccuguuccacgugccagcuccaguguucucuuuuggcgccccuauucugcuggccggccuggucaaaguggccagcagcuucuuuagaagcaccccugaggaccuggaacgggccgaaaaacaa

SEQ ID NO: 247 - protein, 87 aa, Influenza A virus
MGQEQDTPWILSTGHISTQKREDGQQTPKLEHRNSTRLMGHFQKTMNQVVMPKQIVYWRRWLSLRNPILVFLKTRVLKRWRLFSKHE

SEQ ID NO: 248 - DNA, 261 bp, Influenza A virus
atgggacaggaacaggatacaccatggatactgtcaacaggacacatcagtactcagaaaagggaagatggacaacaaacaccgaaactggagcaccgcaactcaacccgattgatgggccacttccagaagacaatgaaccaagtggttatgcccaaacagattgtgtattggaggcgatggctttccttgaggaatcccatcctggtatttttgaaaactcgtgtattgaaacgatggaggttgttcagcaaacacgag

SEQ ID NO: 249 - DNA, 261 bp, Artificial Sequence
  Codon optimised DNA encoding Influenza A virus PB1-F2 protein
atgggccaagagcaggacacaccttggatcctgagcaccggccacatcagcacccagaagagagaggacggacagcagacccctaagctggaacaccggaacagcaccagactgatgggccacttccagaaaaccatgaaccaggtggtcatgcccaagcagatcgtgtactggcggagatggctgagcctgcggaatcctatcctggtgttcctgaaaacccgggtgctgaagagatggcggctgttctctaagcacgag

SEQ ID NO: 250 - RNA, 261 nt, Artificial Sequence
  Codon optimised RNA encoding Influenza A virus PB1-F2 protein
augggccaagagcaggacacaccuuggauccugagcaccggccacaucagcacccagaagagagaggacggacagcagaccccuaagcuggaacaccggaacagcaccagacugaugggccacuuccagaaaaccaugaaccagguggucaugcccaagcagaucguguacuggcggagauggcugagccugcggaauccuauccugguguuccugaaaacccgggugcugaagagauggcggcuguucucuaagcacgag

SEQ ID NO: 251 - protein, 314 aa, Hepatitis A virus
GISDDDSAVAEFFQSFPSGEPSNSKLSSFFQSVTNHKWVAVGAAVGILGLLVGGWFVYKHFSRKEEEPIPAEGVYHGVTKPKQVIKLDADPVESQSTLEIAGLVRKNLVQFGVGEKNGCVRWVMNALGVKDDWLLVPSHAYKFEKDYEMMEFYFNRGGTYYSISAGNVVIQSLDVGFQDVVLMKVPTIPKFRDITQHFIKKGDVPRALNRLATLVTTVNGTPMLISEGPLKMEEKATYVHKKNDGTTVDLTVDQAWRGKGEGLPGMCGGALVSSNQSIQNAILGIHVAGGNSILVAKLITQEMFQNIDKKIESQ

SEQ ID NO: 252 - DNA, 942 bp, Hepatitis A virus
ggaatttcagatgatgacagtgcagtagctgagtttttccagtcttttccatctggtgaaccatcaaattccaagttatctagttttttccaatctgtcactaatcacaagtgggttgctgtgggagctgcagttggtattcttggattgctagtgggaggatggtttgtgtataagcatttttcccgcaaagaggaagaaccaattccagctgaaggggtttatcatggagtgactaagcccaaacaagtgattaaattggatgcagatccagtagagtcccagtcaactctagaaatagcaggattagttaggaaaaatttggttcagtttggagttggtgagaaaaatggatgtgtgagatgggtcatgaatgccttaggagtgaaggatgattggttgttagtaccttctcatgcttataaatttgaaaaggattatgaaatgatggagttttatttcaatagaggtggaacttactattcaatttcagctggtaatgttgttattcaatctttagatgtgggattccaagatgttgttctaatgaaggttcctacaattcccaagtttagagatattactcaacattttattaagaaaggagatgtgcctagagccttgaatcgcttggcaacattagtgacaaccgttaatggaactcctatgttaatttctgagggacctttaaaaatggaagaaaaagccacttatgttcataagaagaacgatggtactacggttgatttgactgtagatcaggcatggagaggaaaaggtgaaggtcttcctggaatgtgtggtggggccctagtgtcatcaaatcagtccatacaaaatgcaattttgggtattcatgttgctggaggaaattcaattcttgtggcaaagttgattactcaagaaatgtttcaaaacattgataagaaaattgaaagtcag

SEQ ID NO: 253 - DNA, 942 bp, Artificial Sequence
  Codon optimised DNA encoding Hepatitis A protein 3ABC
ggcatcagcgacgatgattctgccgtggccgagttcttccagagctttcctagcggcgagcccagcaacagcaagctgagcagcttcttccagtccgtgaccaaccacaaatgggtcgccgtgggagccgctgtgggaattctgggacttctcgttggcggatggttcgtgtacaagcacttcagccggaaagaggaagaacccattcctgccgagggcgtgtaccacggcgtgaccaaacctaagcaagtgatcaagctggacgccgatcctgtggaaagccagagcacactggaaatcgccggactcgtgcggaagaacctggtgcagtttggcgtgggcgagaagaacggctgtgtcagatgggtcatgaacgccctgggcgtgaaggacgattggctgctggttcctagccacgcctacaagttcgagaaggactacgagatgatggaattctacttcaacagaggcggcacctactacagcatcagcgccggcaatgtggtcatccagtctctggatgtgggcttccaggacgtggtgctgatgaaggtgccaacaatccccaagttccgggacatcacccagcacttcatcaagaaaggcgacgtgcccagggctctgaacagactggctaccctggtcaccaccgtgaacggcacacccatgctgatctctgagggcccactgaagatggaagagaaggccacctacgtgcacaagaagaacgacggcaccacagtggacctgaccgtggatcaagcttggagaggcaaaggcgagggcctgcctggaatgtgtggcggagcactggtgtccagcaaccagagcatccagaatgccatcctgggcatccatgtggctggcggcaattctatcctggtggccaagctgatcacccaagagatgttccagaacatcgacaagaagatcgagagccag

SEQ ID NO: 254 - RNA, 942 nt, Artificial Sequence
  Codon optimised RNA encoding Hepatitis A protein 3ABC
ggcaucagcgacgaugauucugccguggccgaguucuuccagagcuuuccuagcggcgagcccagcaacagcaagcugagcagcuucuuccaguccgugaccaaccacaaaugggucgccgugggagccgcugugggaauucugggacuucucguuggcggaugguucguguacaagcacuucagccggaaagaggaagaacccauuccugccgagggcguguaccacggcgugaccaaaccuaagcaagugaucaagcuggacgccgauccuguggaaagccagagcacacuggaaaucgccggacucgugcggaagaaccuggugcaguuuggcgugggcgagaagaacggcugugucagaugggucaugaacgcccugggcgugaaggacgauuggcugcugguuccuagccacgccuacaaguucgagaaggacuacgagaugauggaauucuacuucaacagaggcggcaccuacuacagcaucagcgccggcaauguggucauccagucucuggaugugggcuuccaggacguggugcugaugaaggugccaacaauccccaaguuccgggacaucacccagcacuucaucaagaaaggcgacgugcccagggcucugaacagacuggcuacccuggucaccaccgugaacggcacacccaugcugaucucugagggcccacugaagauggaagagaaggccaccuacgugcacaagaagaacgacggcaccacaguggaccugaccguggaucaagcuuggagaggcaaaggcgagggccugccuggaauguguggcggagcacugguguccagcaaccagagcauccagaaugccauccugggcauccauguggcuggcggcaauucuauccugguggccaagcugaucacccaagagauguuccagaacaucgacaagaagaucgagagccag

SEQ ID NO: 255 - protein, 154 aa, Hepatitis B virus
MAARLCCQLDPARDVLCLRPVGAESRGRPFSGSLGTLSSPSPSAVSTDHGAHLSLRGLPVCAFSSAGPCALRFTSARRMETTVKAQPFLPKVLHKRTLGLSVMSTTDLEAYFKDCLFKDWEELGEEIRLKVFVLGGCRHKLVCAPAPCNFFTSA

SEQ ID NO: 256 - DNA, 462 bp, Hepatitis B virus
atggctgctaggctgtgctgccaactggatcctgcgcgggacgtcctttgtttacgtcccgtcggcgctgaatcccgcggacgacccttctcggggtcgcttgggactctctcgtccccttctccgtctgccgtttcgaccgaccacggggcgcacctctctttacgcggactccccgtctgtgccttctcatctgccggaccgtgtgcacttcgcttcacctctgcacgtcgcatggagaccaccgtgaaagcccaaccattcttgcccaaggtcttacataagaggactcttggactctctgtaatgtcaacgaccgaccttgaggcatacttcaaagactgtttgtttaaagactgggaggagttgggggaggagattagattaaaggtctttgtattaggaggctgtaggcataaattggtctgcgcaccagcaccatgcaactttttcacctctgcc

SEQ ID NO: 257 - DNA, 462 bp, Artificial Sequence
  Codon optimised DNA encoding Hepatitis B X protein
atggccgccagactgtgctgtcaactggaccctgctagggacgtgctgtgtctcagacctgtgggagccgagtctagaggcagacctttttctggctctctgggcaccctgagcagcccatctccatctgccgtgtctacagatcacggcgcccacctgtctctgagaggactgcctgtgtgtgcctttagcagcgccggaccttgcgctctgagattcacatctgccagacggatggaaaccaccgtgaaggcccagcctttcctgcctaaggtgctgcacaagagaaccctgggcctgagcgtgatgagcaccacagatctggaagcctacttcaaggattgcctgttcaaggactgggaagaactgggcgaagagatccggctgaaggtgttcgtgctcggcggatgcagacacaagctcgtgtgtgctcccgctccttgcaacttctttaccagcgct

SEQ ID NO: 258 - RNA, 462 nt, Artificial Sequence
  Codon optimised RNA encoding Hepatitis B X protein
auggccgccagacugugcugucaacuggacccugcuagggacgugcugugucucagaccugugggagccgagucuagaggcagaccuuuuucuggcucucugggcacccugagcagcccaucuccaucugccgugucuacagaucacggcgcccaccugucucugagaggacugccugugugugccuuuagcagcgccggaccuugcgcucugagauucacaucugccagacggauggaaaccaccgugaaggcccagccuuuccugccuaaggugcugcacaagagaacccugggccugagcgugaugagcaccacagaucuggaagccuacuucaaggauugccuguucaaggacugggaagaacugggcgaagagauccggcugaagguguucgugcucggcggaugcagacacaagcucgugugugcucccgcuccuugcaacuucuuuaccagcgcu

SEQ ID NO: 259 - protein, 346 aa, Severe acute respiratory syndrome coronavirus 2
SLENVAYNVVNKGHFDGHAGEAPVSIINNAVYTKVDGIDVEIFENKTTLPVNVAFELWAKRNIKPVPEIKILNNLGVDIAANTVIWDYKREAPAHVSTIGVCTMTDIAKKPTESACSSLTVLFDGRVEGQVDLFRNARNGVLITEGSVKGLTPSKGPAQASVNGVTLIGESVKTQFNYFKKVDGIIQQLPETYFTQSRDLEDFKPRSQMETDFLELAMDEFIQRYKLEGYAFEHIVYGDFSHGQLGGLHLMIGLAKRSQDSPLKLEDFIPMDSTVKNYFITDAQTGSSKCVCSVIDLLLDDFVEIIKSQDLSVISKVVKVTIDYAEISFMLWCKDGHVETFYPKLQ

SEQ ID NO: 260 - DNA, 1038 bp, Severe acute respiratory syndrome coronavirus 2
agtttagaaaatgtggcttataatgttgttaataaaggacactttgatggacacgccggcgaagcacctgtttccatcattaataatgctgtttacacaaaggtagatggtattgatgtggagatctttgaaaataagacaacacttcctgttaatgttgcatttgagctttgggctaagcgtaacattaaaccagtgccagagattaagatactcaataatttgggtgttgatatcgctgctaatactgtaatctgggactacaaaagagaagccccagcacatgtatctacaataggtgtctgcacaatgactgacattgccaagaaacctactgagagtgcttgttcttcacttactgtcttgtttgatggtagagtggaaggacaggtagacctttttagaaacgcccgtaatggtgttttaataacagaaggttcagtcaaaggtctaacaccttcaaagggaccagcacaagctagcgtcaatggagtcacattaattggagaatcagtaaaaacacagtttaactactttaagaaagtagacggcattattcaacagttgcctgaaacctactttactcagagcagagacttagaggattttaagcccagatcacaaatggaaactgactttctcgagctcgctatggatgaattcatacagcgatataagctcgagggctatgccttcgaacacatcgtttatggagatttcagtcatggacaacttggcggtcttcatttaatgataggcttagccaagcgctcacaagattcaccacttaaattagaggattttatccctatggacagcacagtgaaaaattacttcataacagatgcgcaaacaggttcatcaaaatgtgtgtgttctgtgattgatcttttacttgatgactttgtcgagataataaagtcacaagatttgtcagtgatttcaaaagtggtcaaggttacaattgactatgctgaaatttcattcatgctttggtgtaaggatggacatgttgaaaccttctacccaaaactacaa

SEQ ID NO: 261 - DNA, 1038 bp, Artificial Sequence
  Codon optimised DNA encoding SARS-CoV NSP15 protein
agcctggaaaacgtggcctacaacgtggtcaacaagggccactttgatggccacgctggcgaagcccctgtgtccatcattaacaacgccgtgtacaccaaggtggacggcatcgacgtggaaatcttcgagaacaagaccacactgcccgtgaatgtggccttcgagctgtgggccaagcggaacattaagcccgtgcctgagatcaagatcctgaacaacctgggcgtcgacattgccgccaacaccgtgatctgggactacaagagagaagccccagctcacgtgtccaccatcggcgtgtgtaccatgaccgatatcgccaagaagcccaccgagagcgcctgtagctctctgaccgtgctgttcgacggcagagtggaaggccaggtggacctgttcagaaacgccagaaacggcgtgctgatcaccgagggctctgtgaagggactgaccccttctaagggacctgctcaggcctctgtgaatggcgtgacactgatcggcgagagcgtgaaaacccagttcaactacttcaagaaggtcgacgggatcatccagcagctgcccgagacatacttcacccagagccgcgacctggaagatttcaagcctcggagccagatggaaaccgacttcctggaactggccatggacgagttcatccagcggtacaagctggaaggctacgcctttgagcacatcgtgtacggcgatttcagccacggacagctcggaggactgcacctgatgattggcctggccaagagaagccaggacagccctctgaagctcgaggacttcatccccatggacagcaccgtgaagaattacttcatcacagacgcccagaccggcagctctaagtgcgtgtgtagcgtgatcgacctgctgctggacgactttgtggaaatcatcaagagccaggacctgagcgtgatctccaaggtggtcaaagtgaccatcgactacgccgagatcagcttcatgctgtggtgcaaggacggccacgtggaaacattctaccccaagctgcag

SEQ ID NO: 262 - RNA, 1038 nt, Artificial Sequence
  Codon optimised RNA encoding SARS-CoV NSP15 protein
agccuggaaaacguggccuacaacguggucaacaagggccacuuugauggccacgcuggcgaagccccuguguccaucauuaacaacgccguguacaccaagguggacggcaucgacguggaaaucuucgagaacaagaccacacugcccgugaauguggccuucgagcugugggccaagcggaacauuaagcccgugccugagaucaagauccugaacaaccugggcgucgacauugccgccaacaccgugaucugggacuacaagagagaagccccagcucacguguccaccaucggcguguguaccaugaccgauaucgccaagaagcccaccgagagcgccuguagcucucugaccgugcuguucgacggcagaguggaaggccagguggaccuguucagaaacgccagaaacggcgugcugaucaccgagggcucugugaagggacugaccccuucuaagggaccugcucaggccucugugaauggcgugacacugaucggcgagagcgugaaaacccaguucaacuacuucaagaaggucgacgggaucauccagcagcugcccgagacauacuucacccagagccgcgaccuggaagauuucaagccucggagccagauggaaaccgacuuccuggaacuggccauggacgaguucauccagcgguacaagcuggaaggcuacgccuuugagcacaucguguacggcgauuucagccacggacagcucggaggacugcaccugaugauuggccuggccaagagaagccaggacagcccucugaagcucgaggacuucauccccauggacagcaccgugaagaauuacuucaucacagacgcccagaccggcagcucuaagugcguguguagcgugaucgaccugcugcuggacgacuuuguggaaaucaucaagagccaggaccugagcgugaucuccaagguggucaaagugaccaucgacuacgccgagaucagcuucaugcuguggugcaaggacggccacguggaaacauucuaccccaagcugcag

SEQ ID NO: 263 - protein, 98 aa, Severe acute respiratory syndrome coronavirus 2
MDPNQTNVVPPALHLVDPQIQLTITRMEDAMGQGQNSADPKVYPIILRLGSQLSLSMARRNLDSLEARAFQSTPIVVQMTKLATTEELPDEFVVVTAK

SEQ ID NO: 264 - DNA, 294 bp, Severe acute respiratory syndrome coronavirus 2
atggaccccaatcaaaccaacgtagtgccccccgcattacatttggtggacccacagattcaactgacaataaccagaatggaggacgcaatggggcaaggccaaaacagcgccgaccccaaggtttacccaataatactgcgtcttggttcacagctctcactcagcatggcaaggaggaacttagattccctcgaggccagggcgttccaatcaacaccaatagtggtccagatgaccaaattggctactaccgaagagctacccgacgagttcgtggtggtgacggcaaaa

SEQ ID NO: 265 - DNA, 294 bp, Artificial Sequence
  Codon optimised DNA encoding SARS-CoV Orf9b protein
atggaccccaaccagaccaatgtggtgcctcctgctctgcacctggtggaccctcagatccagctgaccatcaccagaatggaagatgccatgggccagggccagaacagcgccgatcctaaggtgtaccccatcatcctgagactgggcagccagctgagcctgagcatggccagaagaaacctggacagcctggaagccagagccttccagagcacacctatcgtggtgcagatgaccaagctggccaccaccgaggaactgcccgatgagtttgtggtggtcaccgccaaa

SEQ ID NO: 266 - RNA, 294 nt, Artificial Sequence
  Codon optimised RNA encoding SARS-CoV Orf9b protein
auggaccccaaccagaccaauguggugccuccugcucugcaccugguggacccucagauccagcugaccaucaccagaauggaagaugccaugggccagggccagaacagcgccgauccuaagguguaccccaucauccugagacugggcagccagcugagccugagcauggccagaagaaaccuggacagccuggaagccagagccuuccagagcacaccuaucguggugcagaugaccaagcuggccaccaccgaggaacugcccgaugaguuugugguggucaccgccaaa

SEQ ID NO: 267 - protein, 142 aa, Human rhinovirus
GPSDLYVHVGNLIYRNLHLFNSEMHDSILISYSSDLIIYRTNTIGDDYIPNCNCTEATYYCRHKNRYYPIKVTPHDWYEIQESEYYPKHIQYNLLIGEGPCEPGDCGGKLLCRHGVIGIITAGGEGHVAFIDLRQFHCAEEQ

SEQ ID NO: 268 - DNA, 426 bp, Human rhinovirus
gggcccagtgatctatatgtgcatgtaggtaacttaatatatagaaacttacatctgttcaattctgaaatgcatgattcaattttgatttcatactcttctgatttaatcatataccgcacaaacactataggtgatgattatattcccaattgtaactgcactgaggctacttattattgtagacacaaaaataggtattacccaataaaagttactccacatgattggtatgaaatacaagagagtgaatattaccccaaacacatccaatacaacctattaattggtgaaggaccatgtgaacctggtgattgtggtggaaaacttctttgtagacatggtgtcattggcataatcacagcaggtggtgaaggtcatgtagcatttatagatcttagacaatttcactgtgctgaggaacaa

SEQ ID NO: 269 - DNA, 426 bp, Artificial Sequence
  Codon optimised DNA encoding Rhinovirus 2Apro protein
ggccctagcgatctgtatgtgcacgtgggcaacctgatctaccggaacctgcacctgttcaacagcgagatgcacgacagcatcctgatcagctacagcagcgacctgatcatctatcggaccaacaccatcggcgacgactacatccccaactgcaactgtaccgaggccacctactactgccggcacaagaaccggtactaccccatcaaagtgacccctcacgattggtacgagatccaagagagcgagtactaccctaagcacatccagtacaacctgctgatcggcgagggaccttgcgagcctggcgattgtggtggaaagctgctgtgtagacacggcgtgatcggcatcattacagccggcggagaaggacacgtggcctttatcgacctgcggcagtttcactgcgccgaggaacag

SEQ ID NO: 270 - RNA, 426 nt, Artificial Sequence
  Codon optimised RNA encoding Rhinovirus 2Apro protein
ggcccuagcgaucuguaugugcacgugggcaaccugaucuaccggaaccugcaccuguucaacagcgagaugcacgacagcauccugaucagcuacagcagcgaccugaucaucuaucggaccaacaccaucggcgacgacuacauccccaacugcaacuguaccgaggccaccuacuacugccggcacaagaaccgguacuaccccaucaaagugaccccucacgauugguacgagauccaagagagcgaguacuacccuaagcacauccaguacaaccugcugaucggcgagggaccuugcgagccuggcgauugugguggaaagcugcuguguagacacggcgugaucggcaucauuacagccggcggagaaggacacguggccuuuaucgaccugcggcaguuucacugcgccgaggaacag

SEQ ID NO: 271 - protein, 183 aa, Human rhinovirus
GPEEEFGRSILKNNTCVITTGNGKFTGLGIHDRILIIPTHADPGREVQVNGVHTKVLDSYDLYNRDGVKLEITVIQLDRNEKFRDIRKYIPETEDDYPECNLALSANQDEPTIIKVGDVVSYGNILLSGNQTARMLKYNYPTKSGYCGGVLYKIGQILGIHVGGNGRDGFSAMLLRSYFTDTQ

SEQ ID NO: 272 - DNA, 549 bp, Human rhinovirus
ggtccagaagaagaatttggaaggtcaattctcaaaaacaatacttgtgtgattactacaggtaatggaaaatttacaggtcttggtatacatgacagaattctaatcatcccaacacatgctgatccaggtagagaggtccaagttaatggtgtccacactaaggttctagactcatatgatctttataatagagatggagttaaacttgaaataacggtcatacaattagatagaaatgaaaaatttagggacattagaaagtatatacctgaaacagaagacgattatccagaatgcaatttggcactttcagctaatcaagatgaaccaactataattaaagtaggagatgtagtgtcctatggcaatattttgcttagtggaaatcaaacagccagaatgcttaaatataattaccccacaaaatcagggtattgtggaggggtactatataaaattggtcaaattctaggtattcatgtgggtggaaatggaagggatggtttttcagctatgttacttagatcatactttacagatactcag

SEQ ID NO: 273 - DNA, 549 bp, Artificial Sequence
  Codon optimised DNA encoding Rhinovirus 3Cpro protein
ggacctgaggaagagttcggcagatccatcctgaagaacaatacctgcgtgatcaccaccggcaacggcaagtttacaggcctgggcatccacgaccggatcctgatcattcccacacacgccgatcctggccgggaagtgcaagtgaatggcgtgcacaccaaggtgctggacagctacgacctgtacaaccgcgacggcgtgaagctggaaatcaccgtgattcagctggaccggaacgagaagttccgggacatccggaagtacatccccgagacagaggacgactaccccgagtgtaatctggccctgagcgccaaccaggacgagcccacaattatcaaagtgggcgacgtggtgtcctacggcaacatcctgctgtccggcaatcagaccgccagaatgctgaagtacaactaccccaccaagagcggctactgtggcggcgtgctgtataagatcggccagatcctgggaattcacgtcggcggcaatggcagagatggcttctctgctatgctgctgcggagctacttcaccgacacacag

SEQ ID NO: 274 - RNA, 549 nt, Artificial Sequence
  Codon optimised RNA encoding Rhinovirus 3Cpro protein
ggaccugaggaagaguucggcagauccauccugaagaacaauaccugcgugaucaccaccggcaacggcaaguuuacaggccugggcauccacgaccggauccugaucauucccacacacgccgauccuggccgggaagugcaagugaauggcgugcacaccaaggugcuggacagcuacgaccuguacaaccgcgacggcgugaagcuggaaaucaccgugauucagcuggaccggaacgagaaguuccgggacauccggaaguacauccccgagacagaggacgacuaccccgaguguaaucuggcccugagcgccaaccaggacgagcccacaauuaucaaagugggcgacgugguguccuacggcaacauccugcuguccggcaaucagaccgccagaaugcugaaguacaacuaccccaccaagagcggcuacuguggcggcgugcuguauaagaucggccagauccugggaauucacgucggcggcaauggcagagauggcuucucugcuaugcugcugcggagcuacuucaccgacacacag

SEQ ID NO: 275 - protein, 835 aa, Rotavirus A
MKVLALRHSVAQVYADTQVYVHDDTKDSYENAFLISNLTTHNILYLNYSIKTLEILNKSGIAAIALQSLEELFTLIRCNFTYDYELDIIYLHDYSYYTNNEIRTDQHWITKTNIEEYLLPGWKLTYVGYNGSETRGHYNFSFKCQNAATDDDLIIEYIYSEALDFQNFMLKKIKERMTTSLPIARLSNRVFRDKLFPSLLKEHKNVVNVGPRNESMFTFLNYPTIKQFSNGAYLVKDTIKLKQERWLGKRISQFDIGQYKNMLNVLTAIYYYYNLYKSKPIIYMIGSAPSYWIYDVRHYSDFFFETWDPLDTPYSSIHHKELFFINDVKKLKDNSILYIDIRTDRGNADWKKWRKTVEEQTINNLDIAYEYLRTGKAKVCCVKMTAMDLELPISAKLLHHPTTEIRSEFYLLLDTWDLTNIRRFIPKGVLYSFINNIITENVFIQQPFKVKVLNDSYIVALYALSNDFNNRSEVIKLINNQKQSLITVRINNTFKDEPKVGFKNIYDWTFLPTDFDTKEAIITSYDGCLGLFGLSISLASKPTGNNHLFILSGTDKYYKLDQFANHTSISRRSHQIRFSESATSYSGYIFRDLSNNNFNLIGTNIENSVSGHVYNALIYYRYNYSFDLKRWIYLHSIDKVDIEGGKYYELAPIELIYACRSAKEFATLQDDLTVLRYSNEIENYINTVYSITYADDPNYFIGIQFRNIPYKYDVKIPHLTFGVLHISDNMVPDVIDILKIMKNELFKMDITTSYTYMLSDGIYVANVSGVLSTYFKIYNVFYKNQITFGQSRMFIPHITLSFNNMRTVRIETTKLQIKSIYLRKIKGDTVFDMVE

SEQ ID NO: 276 - DNA, 2505 bp, Rotavirus A
atgaaagtactagctttaagacacagtgtggctcaagtgtatgcagacactcaagtctacgttcatgatgatacaaaagatagttatgaaaacgcttttttaatctctaatcttacgacccataatattttatacttaaattatagcattaaaacattagaaatattaaataagtcaggaatagctgcaattgctttacaatcacttgaagaattattcacattaataaggtgtaatttcacttatgattatgaacttgatataatatatttacatgattattcatattataccaataatgaaattagaacagaccaacattggataacaaaaacaaatattgaagaatatttactacctggatggaaattaacatatgttggttataatggaagtgaaactagaggacattataacttttcatttaaatgtcaaaacgctgcaacagatgatgatctaataattgaatacatttattcagaagcgttggacttccaaaattttatgttaaaaaagataaaggaaagaatgactacatcgttgcctatagctagattatctaacagagtatttagggataagttattcccatcattattgaaagaacataagaatgtagtgaacgttggtccgcgtaatgaatctatgtttacatttttaaattatccaactataaaacaattttcaaatggtgcgtatttagtaaaagatactataaaattaaaacaagaacgatggttaggtaaaaggatatctcagtttgatattggtcagtataaaaatatgctgaatgttcttacagcaatttattattactataatttatataaaagtaaaccaattatatatatgatcggatctgctccatcttattggatatatgacgttaggcattattccgattttttctttgaaacttgggatccattggacacaccatattcatcaatccatcacaaagaattattttttataaatgatgtgaagaaactgaaggataactcaatattgtatattgatataagaaccgataggggcaatgctgattggaaaaaatggagaaagacagtagaagaacaaactattaataatttggacatagcttatgaatatttacgaacgggtaaagcgaaggtgtgttgtgttaagatgacagctatggatttggaactgccaatttcagctaaattactgcaccacccaactacggaaataagatcagaattttatttattactagatacttgggatttaactaacattaggaggttcattcctaaaggcgtgttatattcatttataaacaatataataactgaaaatgtgtttattcaacaaccatttaaagtaaaagtactgaatgatagttatattgtagcgttatatgcattatcaaatgattttaataatagatcagaagtaattaaattaattaataatcagaaacaatctctaataactgttagaataaataatacgtttaaggatgaaccaaaagttgggttcaaaaatatctatgattggacctttcttccaaccgactttgataccaaagaagctataattacttcatacgacggttgtttaggactctttggtttgtctatatcgttagcatcaaaaccaacagggaataatcatttattcattttaagtggtacagataagtattataaattggatcaatttgctaatcacaccagtatatcgagaagatcacaccaaattaggttttcggaatctgctacttcatattcaggttatatatttagagatttgtccaataataattttaatctaattggtactaatatagagaattcagtatcaggtcatgtatataatgctttaatttattatagatataattattcatttgatcttaaacgctggatttatttacattctatagataaagttgatatagaaggaggaaagtattatgaactcgcaccaatagaattaatttatgcatgtagatcagcaaaagaatttgctacattgcaggatgacttaactgtattgagatattcaaacgaaatagagaattatattaatacagtatatagtataacatacgctgatgatccgaattactttatcggaatacaatttagaaatataccatataaatatgatgttaaaataccgcatttaaccttcggagtattacatatttctgataacatggtgccagacgtgattgacatactaaagataatgaagaatgaattatttaaaatggatattacgaccagttatacatatatgttatcagatggaatctacgtagcaaatgttagtggagtattatctacatactttaaaatctataacgtattttataaaaatcaaataacttttggccaatccagaatgtttattccgcacataacattaagcttcaataacatgagaacagtaaggatagagactactaaattacaaattaaatccatttatttaagaaagattaagggtgatacagtgtttgatatggttgag

SEQ ID NO: 277 - DNA, 2505 bp, Artificial Sequence
  Codon optimised DNA encoding Rotavirus VP3 protein
atgaaggtgctggccctgagacattctgtggcccaggtgtacgccgacacacaggtctacgtgcacgacgacaccaaggacagctacgagaacgccttcctgatcagcaacctgaccacacacaacatcctgtacctgaactacagcatcaagaccctcgagatcctgaacaagagcggaatcgccgctatcgccctgcagagcctggaagaactgttcaccctgatccggtgcaacttcacctacgactacgagctggacatcatctacctgcacgattacagctactacaccaacaacgagatccggaccgaccagcactggatcaccaagaccaacatcgaggaatacctgctgcctggctggaagctgacctacgtgggctacaatggcagcgagacacggggccactacaacttcagcttcaagtgccagaacgccgccaccgacgacgacctgatcatcgagtacatctacagcgaggccctggacttccagaacttcatgctgaagaaaatcaaagaacggatgaccaccagcctgcctatcgccagactgagcaaccgggtgttccgggacaagctgtttcccagcctgctgaaagaacacaagaacgtggtcaacgtgggccccagaaacgagagcatgttcacctttctgaactaccccaccatcaagcagttcagcaacggcgcctacctggtcaaggacacaatcaagctgaagcaagagagatggctgggcaagagaatcagccagttcgacatcggccagtacaagaacatgctgaacgtgctgaccgccatctactactactataacctgtacaagagcaagccgatcatctacatgattggcagcgcccctagctactggatctacgacgtgcggcactacagcgactttttcttcgaaacctgggatcccctggacaccccttacagcagcatccaccacaaagagctgttcttcatcaacgacgtgaagaagctcaaggacaacagcatcctctacatcgacatcagaaccgaccggggcaacgccgactggaagaaatggcggaaaaccgtggaagaacagaccatcaacaacctggatatcgcctacgagtacctgcggaccggcaaggccaaagtgtgctgcgtgaagatgacagccatggacctggaactgcccatcagcgccaaactgctgcaccatcctaccaccgagatcagaagcgagttctatctgctgctggacacctgggacctgaccaatatcagacggttcatccccaagggcgtgctgtactcctttatcaacaacatcatcaccgagaacgtgttcatccagcagccgttcaaagtgaaagtgctgaacgacagctacatcgtggccctgtacgccctgagcaacgacttcaacaatcggagcgaagtgatcaaactgatcaacaatcagaagcagtccctgatcaccgtgcgcatcaacaataccttcaaggacgagcccaaagtgggcttcaagaatatctacgactggaccttcctgcctaccgacttcgacaccaaagaggccatcatcacaagctacgacggctgcctgggcctgtttggcctgtctattagcctggccagcaagcccaccggcaacaaccacctgtttatcctgagcggcaccgacaagtactacaagctggatcagttcgccaaccacaccagcatcagcagaagaagccaccagatccggttcagcgagagcgccacaagctatagcggctacatcttccgggacctgtccaacaacaacttcaacctgatcggcacgaacatcgagaacagcgtgtccggccacgtgtacaacgccctgatctactaccggtacaactactccttcgacctgaagcggtggatctatctgcacagcatcgacaaggtggacatcgaaggcggcaagtactatgagctggcccctatcgagctgatctacgcctgcagaagcgccaaagagttcgccacactgcaggacgatctgaccgtgctgagatacagcaatgagatcgagaactacatcaacaccgtgtactccatcacctacgccgacgatcccaactacttcatcggaatccagttccgcaacatcccctataagtacgacgtcaagatccctcacctgaccttcggcgtgctgcacatcagcgacaacatggtgcccgacgtgatcgacatcctgaagatcatgaagaatgagctgttcaagatggacatcaccaccagctacacctacatgctgagcgacggcatctacgtggccaatgtgtctggcgtgctgagcacctacttcaagatctacaacgtgttctacaagaaccagatcaccttcggccagagccggatgttcatccctcacatcaccctgagctttaacaacatgcggaccgtgcggatcgaaaccaccaagctgcagatcaagagcatctacctccggaagatcaagggcgacaccgtgttcgacatggtggaa

SEQ ID NO: 278 - RNA, 2505 nt, Artificial Sequence
  Codon optimised RNA encoding Rotavirus VP3 protein
augaaggugcuggcccugagacauucuguggcccagguguacgccgacacacaggucuacgugcacgacgacaccaaggacagcuacgagaacgccuuccugaucagcaaccugaccacacacaacauccuguaccugaacuacagcaucaagacccucgagauccugaacaagagcggaaucgccgcuaucgcccugcagagccuggaagaacuguucacccugauccggugcaacuucaccuacgacuacgagcuggacaucaucuaccugcacgauuacagcuacuacaccaacaacgagauccggaccgaccagcacuggaucaccaagaccaacaucgaggaauaccugcugccuggcuggaagcugaccuacgugggcuacaauggcagcgagacacggggccacuacaacuucagcuucaagugccagaacgccgccaccgacgacgaccugaucaucgaguacaucuacagcgaggcccuggacuuccagaacuucaugcugaagaaaaucaaagaacggaugaccaccagccugccuaucgccagacugagcaaccggguguuccgggacaagcuguuucccagccugcugaaagaacacaagaacguggucaacgugggccccagaaacgagagcauguucaccuuucugaacuaccccaccaucaagcaguucagcaacggcgccuaccuggucaaggacacaaucaagcugaagcaagagagauggcugggcaagagaaucagccaguucgacaucggccaguacaagaacaugcugaacgugcugaccgccaucuacuacuacuauaaccuguacaagagcaagccgaucaucuacaugauuggcagcgccccuagcuacuggaucuacgacgugcggcacuacagcgacuuuuucuucgaaaccugggauccccuggacaccccuuacagcagcauccaccacaaagagcuguucuucaucaacgacgugaagaagcucaaggacaacagcauccucuacaucgacaucagaaccgaccggggcaacgccgacuggaagaaauggcggaaaaccguggaagaacagaccaucaacaaccuggauaucgccuacgaguaccugcggaccggcaaggccaaagugugcugcgugaagaugacagccauggaccuggaacugcccaucagcgccaaacugcugcaccauccuaccaccgagaucagaagcgaguucuaucugcugcuggacaccugggaccugaccaauaucagacgguucauccccaagggcgugcuguacuccuuuaucaacaacaucaucaccgagaacguguucauccagcagccguucaaagugaaagugcugaacgacagcuacaucguggcccuguacgcccugagcaacgacuucaacaaucggagcgaagugaucaaacugaucaacaaucagaagcagucccugaucaccgugcgcaucaacaauaccuucaaggacgagcccaaagugggcuucaagaauaucuacgacuggaccuuccugccuaccgacuucgacaccaaagaggccaucaucacaagcuacgacggcugccugggccuguuuggccugucuauuagccuggccagcaagcccaccggcaacaaccaccuguuuauccugagcggcaccgacaaguacuacaagcuggaucaguucgccaaccacaccagcaucagcagaagaagccaccagauccgguucagcgagagcgccacaagcuauagcggcuacaucuuccgggaccuguccaacaacaacuucaaccugaucggcacgaacaucgagaacagcguguccggccacguguacaacgcccugaucuacuaccgguacaacuacuccuucgaccugaagcgguggaucuaucugcacagcaucgacaagguggacaucgaaggcggcaaguacuaugagcuggccccuaucgagcugaucuacgccugcagaagcgccaaagaguucgccacacugcaggacgaucugaccgugcugagauacagcaaugagaucgagaacuacaucaacaccguguacuccaucaccuacgccgacgaucccaacuacuucaucggaauccaguuccgcaacauccccuauaaguacgacgucaagaucccucaccugaccuucggcgugcugcacaucagcgacaacauggugcccgacgugaucgacauccugaagaucaugaagaaugagcuguucaagauggacaucaccaccagcuacaccuacaugcugagcgacggcaucuacguggccaaugugucuggcgugcugagcaccuacuucaagaucuacaacguguucuacaagaaccagaucaccuucggccagagccggauguucaucccucacaucacccugagcuuuaacaacaugcggaccgugcggaucgaaaccaccaagcugcagaucaagagcaucuaccuccggaagaucaagggcgacaccguguucgacaugguggaa

SEQ ID NO: 279 - protein, 675 aa, Hepatitis GB virus B
APFTLQCLSERGTLSAMAVVMTGIDPRTWTGTIFRLGSLATSYMGFVCDNVLYTAHHGSKGRRLAHPTGSIHPITVDAANDQDIYQPPCGAGSLTRCSCGETKGYLVTRLGSLVEVNKSDDPYWCVCGALPMAVAKGSSGAPILCSSGHVIGMFTAARNSGGSVSQIRVRPLVCAGYHPQYTAHATLDTKPTVPNEYSVQILIAPTGSGKSTKLPLSYMQEKYEVLVLNPSVATTASMPKYMHATYGVNPNCYFNGKCTNTGASLTYSTYGMYLTGACSRNYDVIICDECHATDATTVLGIGKVLTEAPSKNVRLVVLATATPPGVIPTPHANITEIQLTDEGTIPFHGKKIKEENLKKGRHLIFEATKKHCDELANELARKGITAVSYYRGCDISKIPEGDCVVVATDALCTGYTGDFDSVYDCSLMVEGTCHVDLDPTFTMGVRVCGVSAIVKGQRRGRTGRGRAGIYYYVDGSCTPSGMVPECNIVEAFDAAKAWYGLSSTEAQTILDTYRTQPGLPAIGANLDEWADLFSMVNPEPSFVNTAKRTADNYVLLTAAQLQLCHQYGYAAPNDAPRWQGARLGKKPCGVLWRLDGADACPGPEPSEVTRYQMCFTEVNTSGTAALAVGVGVAMAYLAIDTFGATCVRRCWSITSVPTGATVAPVVDEEEIVEEC

SEQ ID NO: 280 - DNA, 2025 bp, Hepatitis GB virus B
gcaccttttacgctgcagtgtctctctgaacgtggcacgctgtcagcgatggcagtggtcatgactggtatagacccccgaacttggactggaactatcttcagattaggatctctggccactagctacatgggatttgtttgtgacaacgtgttgtatactgctcaccatggcagcaaggggcgccggttggctcatcccacaggctccatacacccaataaccgttgacgcggctaatgaccaggacatctatcaaccaccatgtggagctgggtcccttactcggtgctcttgcggggagaccaaggggtatctggtaacacgactggggtcattggttgaggtcaacaaatccgatgacccttattggtgtgtgtgcggggcccttcccatggctgttgccaagggttcttcaggtgccccgattctgtgctcctccgggcatgttattgggatgttcaccgctgctagaaattctggcggttcagtcagccagattagggttaggccgttggtgtgtgctggataccatccccagtacacagcacatgccactcttgatacaaaacctactgtgcctaacgagtattcagtgcaaattttaattgcccccactggcagcggcaagtcaaccaaattaccactttcttacatgcaggagaagtatgaggtcttggtcctaaatcccagtgtggctacaacagcatcaatgccaaagtacatgcacgcgacgtacggcgtgaatccaaattgctattttaatggcaaatgtaccaacacaggggcttcacttacgtacagcacatatggcatgtacctgaccggagcatgttcccggaactatgacgtcatcatttgtgacgaatgccatgctaccgatgcaaccaccgtgttgggcattggaaaggttctaaccgaagctccatccaaaaatgttaggctagtggttcttgccacggctaccccccctggagtaatccctacaccacatgccaacataactgagattcaattaaccgatgaaggcactatcccctttcatggaaaaaagattaaggaggaaaatctgaagaaagggagacaccttatctttgaggctaccaaaaaacactgtgatgagcttgctaacgagttagctcgaaagggaataacagctgtctcttactataggggatgtgacatctcaaaaatccctgagggcgactgtgtagtagttgccactgatgccttgtgtacagggtacactggtgactttgattccgtgtatgactgcagcctcatggtagaaggcacatgccatgttgaccttgaccctactttcaccatgggtgttcgtgtgtgcggggtctcagcaatagttaaaggccagcgtaggggccgcacaggccgtgggagagctggcatatactactatgtagacgggagttgtaccccttcgggtatggttcctgaatgcaacattgttgaagccttcgacgcagccaaggcatggtatggtttgtcatcaacagaagctcaaactattctggacacctatcgcacccaacctgggttacctgcgataggagcaaatttggacgagtgggctgatctcttttctatggtcaaccccgaaccttcatttgtcaatactgcaaaaagaactgctgacaattatgttttgttgactgcagcccaactacaactgtgtcatcagtatggctatgctgctcccaatgacgcaccacggtggcagggagcccggcttgggaaaaaaccttgtggggttctgtggcgcttggacggcgctgacgcctgtcctggcccagagcccagcgaggtgaccagataccaaatgtgcttcactgaagtcaatacttctgggacagccgcactcgctgttggcgttggagtggctatggcttatctagccattgacacttttggcgccacttgtgtgcggcgttgctggtctattacatcagtccctaccggtgctactgtcgccccagtggttgacgaagaagaaatcgtggaggagtgt

SEQ ID NO: 281 - DNA, 2025 bp, Artificial Sequence
  Codon optimised DNA encoding GB virus B NS3/4A protein
gcccctttcacactgcaatgcctgagcgagagaggcaccctgtctgccatggccgtggttatgacaggcatcgaccctagaacctggaccggcaccatcttcagactgggaagcctggccacaagctacatgggcttcgtgtgcgacaacgtgctgtacacagcccaccacggcagcaaaggcagaaggctggctcaccctacaggcagcattcaccccatcacagtggacgccgccaacgaccaggatatctaccaacctccttgcggcgctggcagcctgaccagatgttcttgtggcgagacaaagggctacctggtcaccaggctgggatccctggtggaagtgaacaagagcgacgacccctattggtgcgtgtgtggcgcactgcctatggctgtggccaaaggatcttctggcgcccctatcctgtgtagctctggccacgtgatcggcatgtttaccgccgccagaaatagcggcggcagcgtgtcacagattagagtgcggcctcttgtgtgcgccggctatcaccctcagtatacagcccacgccacactggacaccaagcctaccgtgcctaacgagtacagcgtgcagatcctgatcgccccaacaggcagcggcaagagcacaaaactgcccctgagctacatgcaagagaagtacgaggtgctggtgctgaaccctagcgtggccacaacagccagcatgcccaagtacatgcacgccacctatggcgtgaaccccaactgctacttcaacggcaagtgcaccaataccggcgccagcctgacatacagcacctacggcatgtatctgaccggcgcctgcagcagaaactacgacgtgatcatctgcgacgagtgccacgccaccgatgccacaactgtgctcggaatcggcaaggtgctgacagaggcccctagcaagaatgtgcgactggtggtgctggccactgctacaccacctggcgttatccctacacctcacgccaacatcaccgagatccagctgaccgacgagggcacaatcccattccacggcaagaagatcaaagaggaaaacctgaagaagggccgccacctgatcttcgaggccaccaagaaacactgtgacgagctggccaacgaactggccagaaagggcatcaccgccgtgtcctactacagaggctgcgacatcagcaagatccccgagggcgattgtgtggtggtggctacagatgccctgtgtaccggctacaccggcgacttcgatagcgtgtacgactgcagcctgatggtggaaggcacctgtcatgtggatctggaccccacctttaccatgggcgtcagagtgtgcggagtgtccgccatcgtgaagggccagagaagaggcagaactggcagaggcagagccggcatctactactatgtggacggcagctgtacccctagcggcatggtgcctgagtgcaacatcgtggaagccttcgatgccgccaaggcttggtacggcctgtctagcacagaggctcagaccatcctggacacctacagaacccagccaggactgcctgccatcggcgccaatcttgatgaatgggccgacctgttcagcatggtcaaccccgagcctagcttcgtgaacaccgccaagagaaccgccgacaactacgtgctgctgacagccgctcagctccagctgtgtcaccagtacggatacgccgctcctaacgacgcccctagatggcaaggcgctagactgggcaagaaaccatgtggcgttctgtggcgactggatggcgctgatgcttgtcctggacctgagcctagcgaagtgaccagataccagatgtgcttcaccgaagtgaataccagcggcacagctgccctggccgttggtgttggagtggccatggcttacctggccatcgatacctttggcgccacatgcgtgcggagatgctggtctatcaccagcgttccaacaggcgctacagtggcccctgtggtggatgaggaagagattgtggaagagtgc

SEQ ID NO: 282 - RNA, 2025 nt, Artificial Sequence
  Codon optimised RNA encoding GB Virus B NS3/4A protein
gccccuuucacacugcaaugccugagcgagagaggcacccugucugccauggccgugguuaugacaggcaucgacccuagaaccuggaccggcaccaucuucagacugggaagccuggccacaagcuacaugggcuucgugugcgacaacgugcuguacacagcccaccacggcagcaaaggcagaaggcuggcucacccuacaggcagcauucaccccaucacaguggacgccgccaacgaccaggauaucuaccaaccuccuugcggcgcuggcagccugaccagauguucuuguggcgagacaaagggcuaccuggucaccaggcugggaucccugguggaagugaacaagagcgacgaccccuauuggugcguguguggcgcacugccuauggcuguggccaaaggaucuucuggcgccccuauccuguguagcucuggccacgugaucggcauguuuaccgccgccagaaauagcggcggcagcgugucacagauuagagugcggccucuugugugcgccggcuaucacccucaguauacagcccacgccacacuggacaccaagccuaccgugccuaacgaguacagcgugcagauccugaucgccccaacaggcagcggcaagagcacaaaacugccccugagcuacaugcaagagaaguacgaggugcuggugcugaacccuagcguggccacaacagccagcaugcccaaguacaugcacgccaccuauggcgugaaccccaacugcuacuucaacggcaagugcaccaauaccggcgccagccugacauacagcaccuacggcauguaucugaccggcgccugcagcagaaacuacgacgugaucaucugcgacgagugccacgccaccgaugccacaacugugcucggaaucggcaaggugcugacagaggccccuagcaagaaugugcgacugguggugcuggccacugcuacaccaccuggcguuaucccuacaccucacgccaacaucaccgagauccagcugaccgacgagggcacaaucccauuccacggcaagaagaucaaagaggaaaaccugaagaagggccgccaccugaucuucgaggccaccaagaaacacugugacgagcuggccaacgaacuggccagaaagggcaucaccgccguguccuacuacagaggcugcgacaucagcaagauccccgagggcgauuguguggugguggcuacagaugcccuguguaccggcuacaccggcgacuucgauagcguguacgacugcagccugaugguggaaggcaccugucauguggaucuggaccccaccuuuaccaugggcgucagagugugcggaguguccgccaucgugaagggccagagaagaggcagaacuggcagaggcagagccggcaucuacuacuauguggacggcagcuguaccccuagcggcauggugccugagugcaacaucguggaagccuucgaugccgccaaggcuugguacggccugucuagcacagaggcucagaccauccuggacaccuacagaacccagccaggacugccugccaucggcgccaaucuugaugaaugggccgaccuguucagcauggucaaccccgagccuagcuucgugaacaccgccaagagaaccgccgacaacuacgugcugcugacagccgcucagcuccagcugugucaccaguacggauacgccgcuccuaacgacgccccuagauggcaaggcgcuagacugggcaagaaaccauguggcguucuguggcgacuggauggcgcugaugcuuguccuggaccugagccuagcgaagugaccagauaccagaugugcuucaccgaagugaauaccagcggcacagcugcccuggccguugguguuggaguggccauggcuuaccuggccaucgauaccuuuggcgccacaugcgugcggagaugcuggucuaucaccagcguuccaacaggcgcuacaguggccccugugguggaugaggaagagauuguggaagagugc

SEQ ID NO: 283 - protein, 219 aa, Hepatitis A virus
STLEIAGLVRKNLVQFGVGEKNGCVRWVMNALGVKDDWLLVPSHAYKFEKDYEMMEFYFNRGGTYYSISAGNVVIQSLDVGFQDVVLMKVPTIPKFRDITQHFIKKGDVPRALNRLATLVTTVNGTPMLISEGPLKMEEKATYVHKKNDGTTVDLTVDQAWRGKGEGLPGMCGGALVSSNQSIQNAILGIHVAGGNSILVAKLVTQEMFQNIDKKIESQ

SEQ ID NO: 284 - DNA, 657 bp, Hepatitis A virus
tcaactttggaaatagcaggactggttaggaagaacttggttcagtttggagttggagagaagaatggatgtgtgagatgggttatgaatgccttgggagtgaaagatgattggctgcttgtgccttcccatgcttataaatttgagaaagattatgaaatgatggagttttattttaatagaggtggaacttactattcaatttcagctggtaatgttgttattcaatctttggatgtgggattccaggatgttgttctgatgaaggttcctacaattcctaagtttagagatattactcagcattttattaagaaaggggatgtgcctagagctttgaatcgcctggcaacattagtgacaactgtaaatggaacccctatgttaatttctgagggcccactaaagatggaagagaaagctacttatgttcataagaaaaatgatggtacaacagttgatttaactgtggatcaggcatggagaggaaaaggcgaaggtcttcctggaatgtgtggtggggccttggtttcatcgaatcaatctatacagaatgcaatcttgggcatccatgttgctggaggaaattcaattcttgttgcaaaattggttactcaagaaatgttccaaaatattgataagaaaattgaaagtcag

SEQ ID NO: 285 - DNA, 657 bp, Artificial Sequence
  Codon optimised DNA encoding HAV 3Cpro protein
agcacactggaaatcgccggactcgtgcggaagaacctggtgcagtttggcgtgggcgagaagaacggctgtgtcagatgggtcatgaacgccctgggcgtgaaggacgattggctgctggttcctagccacgcctacaagttcgagaaggactacgagatgatggaattctacttcaacagaggcggcacctactacagcatcagcgccggcaatgtggtcatccagtctctggatgtgggcttccaggacgtggtgctgatgaaggtgccaacaatccccaagttccgggacatcacccagcacttcatcaagaaaggcgacgtgcccagggctctgaacagactggctaccctggtcaccaccgtgaacggcacacccatgctgatctctgagggcccactgaagatggaagagaaggccacctacgtgcacaagaagaacgacggcaccacagtggacctgaccgtggatcaagcttggagaggcaaaggcgagggcctgcctggaatgtgtggcggagcactggtgtccagcaaccagagcatccagaatgccatcctgggcatccatgtggctggcggcaattctatcctggtggccaagctggtcacccaagagatgttccagaacatcgacaagaagatcgagagccag

SEQ ID NO: 286 - RNA, 657 nt, Artificial Sequence
  Codon optimised RNA encoding HAV 3Cpro protein
agcacacuggaaaucgccggacucgugcggaagaaccuggugcaguuuggcgugggcgagaagaacggcugugucagaugggucaugaacgcccugggcgugaaggacgauuggcugcugguuccuagccacgccuacaaguucgagaaggacuacgagaugauggaauucuacuucaacagaggcggcaccuacuacagcaucagcgccggcaauguggucauccagucucuggaugugggcuuccaggacguggugcugaugaaggugccaacaauccccaaguuccgggacaucacccagcacuucaucaagaaaggcgacgugcccagggcucugaacagacuggcuacccuggucaccaccgugaacggcacacccaugcugaucucugagggcccacugaagauggaagagaaggccaccuacgugcacaagaagaacgacggcaccacaguggaccugaccguggaucaagcuuggagaggcaaaggcgagggccugccuggaauguguggcggagcacugguguccagcaaccagagcauccagaaugccauccugggcauccauguggcuggcggcaauucuauccugguggccaagcuggucacccaagagauguuccagaacaucgacaagaagaucgagagccag

SEQ ID NO: 287 - protein, 71 aa, Human metapneumovirus
MTLHMPCKTVKALIKCSEHGPVFITIEVDEMIWTQKELKEALSDGIVKSHTNIYNCYLENIEIIYVKAYLS

SEQ ID NO: 288 - DNA, 213 bp, Human metapneumovirus
atgactcttcatatgccctgcaagacagtgaaagcattaatcaagtgcagtgagcatggtcctgttttcattactatagaggttgatgaaatgatatggactcaaaaagaattaaaagaagctttgtccgatgggatagtgaagtctcacaccaacatttacaattgttatttagaaaacatagaaattatatatgtcaaggcttacttaagt

SEQ ID NO: 289 - DNA, 213 bp, Artificial Sequence
  Codon optimised DNA encoding Human metapneumovirus M2-2 protein
atgaccctgcacatgccctgcaagacagtgaaggccctgatcaagtgtagcgagcacggccccgtgttcatcaccattgaggtggacgagatgatctggacccagaaagagctgaaagaggccctgagcgacggcatcgtgaagtcccacaccaacatctacaactgctacctcgagaacatcgagatcatctacgtgaaggcctacctgagc

SEQ ID NO: 290 - RNA, 213 nt, Artificial Sequence
  Codon optimised RNA encoding Human metapneumovirus M2-2 protein
augacccugcacaugcccugcaagacagugaaggcccugaucaaguguagcgagcacggccccguguucaucaccauugagguggacgagaugaucuggacccagaaagagcugaaagaggcccugagcgacggcaucgugaagucccacaccaacaucuacaacugcuaccucgagaacaucgagaucaucuacgugaaggccuaccugagc

SEQ ID NO: 291 - protein, 181 aa, Hepatitis E virus
EVFWNQPIQRVIHNELELYCRARSGRCLEIGAHPRSINDNPNVVHRCFLRPVGRDVQRWYTAPTRGPAANCRRSALRGLPAADRTYCFDGFSGCSCPAETGIALYSLHDMSPSDVAEAMFRHGMTRLYAALHLPPEVLLPPGTYRTASYLLIHDGRRVVVTYEGDTSAGYNHDVSNLRSWI

SEQ ID NO: 292 - DNA, 543 bp, Hepatitis E virus
gaggttttctggaatcaacccatccagcgtgtcattcataacgagctggagctttactgccgcgctcgctccggccgctgtcttgaaattggcgcccatccccgctcaataaatgataatcctaatgtggtccaccgctgcttcctccgccctgttgggcgtgatgttcagcgctggtatactgctcccactcgcgggccggctgctaattgccgccgttccgcgttgcgtgggcttcccgctgctgaccgcacatactgcttcgacgggttttctggctgtagctgccccgccgagacgggtatcgccctttactccctccatgatatgtcaccatctgatgttgccgaggccatgttccgccatggtatgacgcggctttatgctgccctccatcttccgcctgaggtcttgctgccccctggcacatatcgcaccgcatcgtatttgctgattcatgacggcaggcgcgttgtggtgacgtatgagggtgatactagtgctggttacaaccacgatgtctccaacttgcgctcctggatt

SEQ ID NO: 293 - DNA, 543 bp, Artificial Sequence
  Codon optimised DNA encoding Hepatitis E methyltransferase protein
gaggtgttctggaaccagcctatccagagagtgatccacaacgagctggaactgtactgcagagccagatccggccggtgtctggaaattggagcccatcctcggagcatcaacgacaaccccaacgtggtgcacagatgctttctgaggcccgtgggcagagatgtgcagcggtggtatacagcccctacaagaggacctgccgccaactgtagaagaagcgccctgagaggactgcctgccgccgatagaacctactgcttcgatggcttcagcggctgcagctgtcctgccgaaactggaatcgccctgtacagcctgcacgacatgagcccatctgatgtggccgaggccatgttcagacacggcatgaccagactgtacgccgctctgcatctgcctccagaagttctgctgcctcctggcacctacagaaccgccagctatctgctgatccacgatgggagaagagtggtggtcacctacgagggcgatacaagcgccggctacaaccacgacgtgtccaacctgagaagctggatc

SEQ ID NO: 294 - RNA, 543 nt, Artificial Sequence
  Codon optimised RNA encoding Hepatitis E methyltransferase protein
gagguguucuggaaccagccuauccagagagugauccacaacgagcuggaacuguacugcagagccagauccggccggugucuggaaauuggagcccauccucggagcaucaacgacaaccccaacguggugcacagaugcuuucugaggcccgugggcagagaugugcagcggugguauacagccccuacaagaggaccugccgccaacuguagaagaagcgcccugagaggacugccugccgccgauagaaccuacugcuucgauggcuucagcggcugcagcuguccugccgaaacuggaaucgcccuguacagccugcacgacaugagcccaucugauguggccgaggccauguucagacacggcaugaccagacuguacgccgcucugcaucugccuccagaaguucugcugccuccuggcaccuacagaaccgccagcuaucugcugauccacgaugggagaagagugguggucaccuacgagggcgauacaagcgccggcuacaaccacgacguguccaaccugagaagcuggauc

SEQ ID NO: 295 - protein, 390 aa, Suid herpesvirus 2
MLAMWRWVTKRSRLRRGHAHLGGNKGVRGICSLYLAGLSRGLSRVHAQRSHAATMADAGIPDEILYSDISDDEIIIDGDGDGDSSGDEDDDDGGLTRQAASRIATDLGFEVLQPLQSGSEGRVFVARRPGEADTVVLKVGQKPSTLMEGMLLKRLAHDNVMSLKQMLARGPVTCLVLPHFRCDLYSYLTMRDGPLDMRDAGRVIRSVLRGLAYLHGMRIMHRDVKAENIFLEDVDTVCLGDLGAARCNVAAPNFYGLAGTIETNAPEVLARDRYDTKVDVWGAGVVLFETLAYPKTIAGGDEPAINGEMHLIDLIRALGVHPEEFPPDTRLRSEFVRYAGTHRQPYTQYARVARLGLPETGAFLIYKMLTFDPVRRPSADEILNFGMWTV

SEQ ID NO: 296 - DNA, 1170 bp, Suid herpesvirus 2
atgctggcgatgtggagatgggtcaccaagaggtcgcggctccgccgaggccacgcccatcttgggggaaataaaggagtccggggaatttgttccttataccttgccgggctcagcagggggttgtcgcgcgtccacgcccagcgctcgcacgcagcaacaatggccgacgccggaatccccgacgagatcctgtactcggacatcagcgacgacgagatcatcatcgacggcgacggcgacggcgacagcagcggggacgaggacgacgatgacggggggctgacgcggcaggccgcgtcgcgcatcgccacggacctgggcttcgaggtgctgcagcccctgcagtcgggctcggagggccgcgtcttcgtggcccgccggcccggcgaggcggacacggtggtgctgaaggtgggccagaagccctcgacgctgatggagggcatgctgctgaagcgcctggcccacgataacgtcatgagcctgaagcagatgctcgcccggggcccggtgacgtgcctggtcctgccgcactttcggtgcgatctgtacagctacctgaccatgcgggacgggccgctggacatgcgcgacgccgggcgcgtgatccggtccgtgctccgcgggctcgcctacctgcacgggatgcgcatcatgcaccgcgacgtcaaggcggagaacatcttcctcgaggacgtggacacggtgtgcctgggggacctcggggccgcgcgctgcaacgtggcggcgcccaacttttacgggctcgccgggaccatcgagaccaacgcccccgaggtgctcgcgcgcgaccgctacgacaccaaggtcgacgtctggggcgcgggggtggtgctcttcgagacgctggcctaccccaagacgatcgccggcggggacgagcccgcgatcaacggggagatgcacctgatcgacctcatccgcgccctcggggtgcaccccgaggagttcccgcccgacacgcgcctccggagcgagttcgtccggtacgccgggacccaccgccagccgtacacgcagtacgcgcgcgtggctcgcctcgggctgcccgagacgggggctttcctgatttacaagatgttgacgtttgatcccgtccgccgcccttccgctgatgagatactcaactttggaatgtggaccgta

SEQ ID NO: 297 - DNA, 1170 bp, Artificial Sequence
  Codon optimised DNA encoding PRRV Npro protein
atgctggccatgtggcgctgggtcaccaagagaagcagactgagaagaggacacgcccacctcggcggaaacaagggcgttagaggcatctgcagcctgtatctggccggcctgtctagaggactgagcagagtgcatgcccagagatctcacgccgccacaatggccgatgctggcatccctgatgagatcctgtacagcgacatcagcgacgacgagatcatcatcgatggcgacggcgacggggatagcagcggagatgaggatgacgatgatggcggcctgacaagacaggctgccagcagaattgccaccgacctgggatttgaggtgctgcagcctctgcagtctggctctgagggcagagtgttcgtggctagaaggcctggcgaagccgataccgtggtgctgaaagtgggccagaaacctagcacactgatggaaggcatgctgctgaagagactggcccacgacaacgtgatgagcctgaagcagatgctggctagaggccctgtgacctgtctggtgctgcctcacttcagatgcgacctgtactcctacctgaccatgagagatggccctctggatatgcgcgacgccggcagagtgatcagatctgtgctgagaggcctggcctacctgcacggcatgagaatcatgcacagggacgtgaaggccgagaacatctttctggaagatgtggacaccgtgtgcctgggcgatctgggagccgctagatgtaatgtggccgctcctaacttctacggcctggccggaaccatcgagacaaatgcccctgaagtgctggcccgggacagatacgataccaaggtggacgtttggggagccggcgtggtcctgtttgagacactggcttaccccaagacaatcgctggcggcgacgagcctgctatcaatggcgagatgcacctgatcgacctgatcagagccctgggcgtgcaccctgaggaattccctccagacacacggctgcggagcgagttcgttagatacgccggaacacacagacagccctacacacagtatgccagagtggccagactgggcctgcctgaaacaggcgccttcctgatctacaagatgctgaccttcgatcccgtgcggaggccttctgccgatgagattctgaacttcggcatgtggaccgtg

SEQ ID NO: 298 - RNA, 1170 nt, Artificial Sequence
  Codon optimised RNA encoding PRRV Npro protein
augcuggccauguggcgcugggucaccaagagaagcagacugagaagaggacacgcccaccucggcggaaacaagggcguuagaggcaucugcagccuguaucuggccggccugucuagaggacugagcagagugcaugcccagagaucucacgccgccacaauggccgaugcuggcaucccugaugagauccuguacagcgacaucagcgacgacgagaucaucaucgauggcgacggcgacggggauagcagcggagaugaggaugacgaugauggcggccugacaagacaggcugccagcagaauugccaccgaccugggauuugaggugcugcagccucugcagucuggcucugagggcagaguguucguggcuagaaggccuggcgaagccgauaccguggugcugaaagugggccagaaaccuagcacacugauggaaggcaugcugcugaagagacuggcccacgacaacgugaugagccugaagcagaugcuggcuagaggcccugugaccugucuggugcugccucacuucagaugcgaccuguacuccuaccugaccaugagagauggcccucuggauaugcgcgacgccggcagagugaucagaucugugcugagaggccuggccuaccugcacggcaugagaaucaugcacagggacgugaaggccgagaacaucuuucuggaagauguggacaccgugugccugggcgaucugggagccgcuagauguaauguggccgcuccuaacuucuacggccuggccggaaccaucgagacaaaugccccugaagugcuggcccgggacagauacgauaccaagguggacguuuggggagccggcgugguccuguuugagacacuggcuuaccccaagacaaucgcuggcggcgacgagccugcuaucaauggcgagaugcaccugaucgaccugaucagagcccugggcgugcacccugaggaauucccuccagacacacggcugcggagcgaguucguuagauacgccggaacacacagacagcccuacacacaguaugccagaguggccagacugggccugccugaaacaggcgccuuccugaucuacaagaugcugaccuucgaucccgugcggaggccuucugccgaugagauucugaacuucggcauguggaccgug

SEQ ID NO: 299 - protein, 481 aa, human herpesvirus 1
MACRKFCRVYGGQGRRKEEAVPPETKPSRVFPHGPFYTPAEDACLDSPPPETPKPSHTTPPSEAERLCHLQEILAQMYGNQDYPIEDDPSADAADDVDEDAPDDVAYPEEYAEELFLPGDATGPLIGANDHIPPPCGASPPGIRRRSRDEIGATGFTAEELDAMDREAARAISRGGKPPSTMAKLVTGMGFTIHGALTPGSEGCVFDSSHPDYPQRVIVKAGWYTSTSHEARLLRRLDHPAILPLLDLHVVSGVTCLVLPKYQADLYTYLSRRLNPLGRPQIAAVSRQLLSAVDYIHRQGIIHRDIKTENIFINTPEDICLGDFGAACFVQGSRSSPFPYGIAGTIDTNAPEVLAGDPYTTTVDIWSAGLVIFETAVHNASLFSAPRGPKRGPCDSQITRIIRQAQVHVDEFSPHPESRLTSRYRSRAAGNNRPPYTRPAWTRYYKMDIDVEYLVCKALTFDGALRPSAAELLCLPLFQQK

SEQ ID NO: 300 - DNA, 1443 bp, human herpesvirus 1
atggcctgtcgtaagttttgtcgcgtttacgggggacagggcaggaggaaggaggaggccgtcccgccggagacaaagccgtcccgggtgtttcctcatggccccttttataccccagccgaggacgcgtgcctggactccccgcccccggagacccccaaaccttcccacaccacaccacccagcgaggccgagcgcctgtgtcatctgcaggagatccttgcccagatgtacggaaaccaggactaccccatagaggacgaccccagcgcggatgccgcggacgatgtcgacgaggacgccccggacgacgtggcctatccggaggaatacgcagaggagctttttctgcccggggacgcgaccggtccccttatcggggccaacgaccacatccctcccccgtgtggcgcatctccccccggtatacgacgacgcagccgggatgagattggggccacgggatttaccgcggaagagctggacgccatggacagggaggcggctcgagccatcagccgcggcggcaagcccccctcgaccatggccaagctggtgactggcatgggctttacgatccacggagcgctcaccccaggatcggaggggtgtgtctttgacagcagccatccagattacccccaacgggtaatcgtgaaggcggggtggtacacgagcacgagccacgaggcgcgactgctgaggcgactggaccacccggcgatcctgcccctcctggacctgcatgtcgtctccggggtcacgtgtctggtcctccccaagtaccaggccgacctgtatacctatctgagtaggcgcctgaacccactgggacgcccgcagatcgcagcggtctcccggcagctcctaagcgccgttgactacattcaccgccagggcattatccaccgcgacattaagaccgaaaatatttttattaacacccccgaggacatttgcctgggggactttggcgccgcgtgcttcgtgcagggttcccgatcaagccccttcccctacggaatcgccggaaccatcgacaccaacgcccccgaggtcctggccggggatccgtataccacgaccgtcgacatttggagcgccggtctggtgatcttcgagactgccgtccacaacgcgtccttgttctcggccccccgcggccccaaaaggggcccgtgcgacagtcagatcacccgcatcatccgacaggcccaggtccacgttgacgagttttccccgcatccagaatcgcgcctcacctcgcgctaccgctcccgcgcggccgggaacaatcgcccgccgtacacccgaccggcctggacccgctactacaagatggacatagacgtcgaatatctggtttgcaaagccctcaccttcgacggcgcgcttcgccccagcgccgcagagctgctttgtttgccgctgtttcaacagaaa

SEQ ID NO: 301 - DNA, 1443 bp, Artificial Sequence
  Codon optimised DNA encoding HSV1 US3 protein
atggcctgccggaagttctgtagagtgtacggcggacaggggcgcagaaaagaggaagccgttcctcctgagacaaagcccagcagagtgttccctcacggccccttttacacccctgccgaagatgcctgtctggacagccctcctccagaaacacctaagcctagccacaccacacctccaagcgaggccgaaagactgtgccatctgcaagagattctggcccagatgtacggcaaccaggactaccccatcgaggacgatccatctgccgatgccgccgacgatgtggatgaagatgcccctgatgacgtggcctatcctgaggaatacgccgaggaactgttcctgcctggcgacgctacaggacctctgatcggagccaacgatcacatccctccaccttgtggcgctagccctcctggcatcagaagaagaagcagggacgagatcggcgccaccggctttacagccgaagaactggacgccatggacagagaagccgccagagccatttctagaggcggcaagcctcctagcaccatggccaaactggttaccggcatgggcttcaccattcacggcgctctgacacctggctctgagggctgtgtgttcgacagctctcaccccgactatccccagcgcgtgatcgtgaaagccggctggtacacaagcacaagccacgaggccagactgctgcggagactggatcatcctgccatcctgcctctgctggatctgcatgtggtgtccggcgtgacatgtctggtgctgcctaagtaccaggccgacctgtacacctacctgagcagaaggctgaaccctctgggcagacctcagattgccgctgtgtcaagacagctgctgagcgctgtggactacatccacagacagggcatcatccaccgggacatcaagaccgagaatatcttcatcaacacgcccgaggacatctgcctgggcgattttggcgccgcttgcttcgtgcaaggcagcagaagcagcccctttccttatggaatcgccggcaccatcgacacaaacgcccctgaagttctggccggcgatccttacaccaccaccgtggatatttggagcgccggactggtcatcttcgagacagccgtgcataacgccagcctgttctctgcccctagaggccctaaaagaggcccctgcgatagccagatcacccggatcattagacaggcccaggtgcacgtggacgagttctctccacatcctgagagccggctgaccagccggtacagatctagagccgccggaaacaaccggcctccatacacaagacctgcctggacacggtactacaagatggacatcgacgtggaatacctcgtgtgcaaggccctgaccttcgatggcgcccttagaccttctgccgccgaactgctttgcctgccactgttccagcagaag

SEQ ID NO: 302 - RNA, 1443 nt, Artificial Sequence
  Codon optimised RNA encoding HSV1 US3 protein
auggccugccggaaguucuguagaguguacggcggacaggggcgcagaaaagaggaagccguuccuccugagacaaagcccagcagaguguucccucacggccccuuuuacaccccugccgaagaugccugucuggacagcccuccuccagaaacaccuaagccuagccacaccacaccuccaagcgaggccgaaagacugugccaucugcaagagauucuggcccagauguacggcaaccaggacuaccccaucgaggacgauccaucugccgaugccgccgacgauguggaugaagaugccccugaugacguggccuauccugaggaauacgccgaggaacuguuccugccuggcgacgcuacaggaccucugaucggagccaacgaucacaucccuccaccuuguggcgcuagcccuccuggcaucagaagaagaagcagggacgagaucggcgccaccggcuuuacagccgaagaacuggacgccauggacagagaagccgccagagccauuucuagaggcggcaagccuccuagcaccauggccaaacugguuaccggcaugggcuucaccauucacggcgcucugacaccuggcucugagggcuguguguucgacagcucucaccccgacuauccccagcgcgugaucgugaaagccggcugguacacaagcacaagccacgaggccagacugcugcggagacuggaucauccugccauccugccucugcuggaucugcaugugguguccggcgugacaugucuggugcugccuaaguaccaggccgaccuguacaccuaccugagcagaaggcugaacccucugggcagaccucagauugccgcugugucaagacagcugcugagcgcuguggacuacauccacagacagggcaucauccaccgggacaucaagaccgagaauaucuucaucaacacgcccgaggacaucugccugggcgauuuuggcgccgcuugcuucgugcaaggcagcagaagcagccccuuuccuuauggaaucgccggcaccaucgacacaaacgccccugaaguucuggccggcgauccuuacaccaccaccguggauauuuggagcgccggacuggucaucuucgagacagccgugcauaacgccagccuguucucugccccuagaggcccuaaaagaggccccugcgauagccagaucacccggaucauuagacaggcccaggugcacguggacgaguucucuccacauccugagagccggcugaccagccgguacagaucuagagccgccggaaacaaccggccuccauacacaagaccugccuggacacgguacuacaagauggacaucgacguggaauaccucgugugcaaggcccugaccuucgauggcgcccuuagaccuucugccgccgaacugcuuugccugccacuguuccagcagaag

SEQ ID NO: 303 - protein, 414 aa, human herpesvirus 2
MADIPPDPPALNTTPVNHAPPSPPPGSRKRRRPVLPSSSESEGKPDTESESSSTESSEDEAGDLRGGRRRSPRELGGRYFLDLSAESTTGTESEGTGPSDDDDDDASDGWLVDTPPRKSKRPRINLRLTSSPDRRAGVVFPEVWRNDRPIRAAQPQAPAQSSGDRAAAPRRSARQAQMRSGAAWTLDLHYIRQCVNQLFRILRAAPNPPGSANRLRHLVRDCYLMGYCRTRLGPRTWGRLLQISGGTWDVRLRNAIREVEARFEPAAEPVCELPCLNARRYGPECDVGNLETNGGSTSDDEISDATDSDDTLASHSDTEGGPSPAGRENPESASGGAIAARLECEFGTFDWTSEEGSQPWLSAVVADTSSAERSGLPAPGACRATEAPEREDGCRKMRFPAACPYPCGHTFLRP

SEQ ID NO: 304 - DNA, 1242 bp, human herpesvirus 2
atggcagacatccccccggacccgcccgcgctcaacacgacgcctgtgaatcatgctcccccatccccgcccccgggttcacggaagcgcagacgccccgtcctccccagctcgtcggaatctgagggtaagcccgacacagaatcggaatcctcctcgaccgagtcgtccgaggatgaggcgggagacctacgcggcgggcgccgtcgctccccgcgggagctcggggggaggtattttttggatctgtcggcagaatcgaccacggggacggaatcggagggaacggggccgtcggacgacgatgatgatgatgcgtcagacggctggttggttgacacccccccccgtaaatccaagcgaccccgaatcaacctgcgattaacgagctcccccgaccggcgcgcgggtgtggttttccccgaggtgtggagaaacgacagacctatccgcgcggcgcaaccccaggccccggcccagtcttccggggatcgcgcagccgcaccgcggcgctctgctcgccaggcccagatgcggagcggagccgcctggacgcttgatctgcattacatacgccagtgcgtcaaccagctctttcggatcctgcgtgccgccccgaacccgcccggcagcgccaaccgcctgcgccacctggtgcgagactgctacctcatgggctactgccggacccgcctggggccgcgcacgtggggccgcctgctgcagatctcgggcggaacctgggacgtgcgcctgcgaaacgcaatccgggaggtcgaggcgcgttttgaacccgccgccgagcccgtgtgcgagctgccctgtctgaacgccaggcgttacggccccgagtgtgatgttggcaatctcgagaccaacggcggctcgacgagcgatgatgagatatcggatgcgacggactcggacgataccctcgcgtcccattccgacacggagggggggccctccccggccggccgggagaacccggaatccgcgtccggcggggctatcgcggctcggctggagtgtgagtttgggacgtttgactggacgtccgaggagggctcccagccctggctgtccgcggtggtcgccgataccagctccgccgaacgctctggcctacccgccccgggcgcgtgtcgcgcaacggaagccccagaacgcgaggacgggtgccgaaaaatgcgcttccccgccgcctgcccctatccctgcggccacacatttctccggcca

SEQ ID NO: 305 - DNA, 1242 bp, Artificial Sequence
  Codon optimised DNA encoding HSV2 US1 protein
atggccgacattcctcctgatcctccagctctgaacaccacacctgtgaatcacgcccctccatctccaccacctggcagcagaaagagaagaaggcctgtcctgcctagcagcagcgagtctgagggcaagcctgatacagagagcgagagcagcagcacagagagcagcgaggacgaagctggcgatcttagaggcggcagaagaagaagccccagagaactcggcggcagatacttcctggatctgagcgccgagagcaccaccggcactgaatctgaaggcacaggccccagcgacgacgatgacgatgatgcctctgatggctggctggtggacacccctcctagaaagtccaagcggcccagaatcaacctgcggctgacaagctctcctgatcgcagagctggcgtggtgttccccgaagtgtggcggaacgacagacctatcagagccgctcagcctcaggctcctgctcagtctagcggagatagagctgccgctcctagaagatctgccagacaggcccagatgagaagcggagctgcttggacactggacctgcactacatccggcagtgcgtgaaccagctgttccggatccttcgggctgcccctaatccacctggctccgccaatagactgagacaccttgtgcgggactgctacctgatgggctactgcagaacaagactgggccccagaacatggggcagactgctgcaaatctctggcggcacatgggacgtgcggctgagaaacgccattagagaggtggaagccagattcgagccagccgctgagcctgtgtgtgaactgccttgtctgaacgctcggagatacggccccgagtgtgatgtgggcaacctggaaacaaatggcggcagcacctccgacgacgagatctctgatgccaccgacagcgacgatacactggccagccacagcgatacagaaggcggaccatctcctgccggaagagagaatcctgagtctgcctctggcggagctatcgccgcaagactggaatgcgagttcggcaccttcgactggacaagcgaggaaggctctcagccttggctgtctgctgtggtggccgatacctctagcgccgaaagatctggacttcctgctcctggcgcctgcagagctacagaagctcctgaaagagaggacggctgcagaaagatgcggttccctgccgcctgtccttatccttgcggccacacatttctgcggcct

SEQ ID NO: 306 - RNA, 1242 nt, Artificial Sequence
  Codon optimised RNA encoding HSV2 US1 protein
auggccgacauuccuccugauccuccagcucugaacaccacaccugugaaucacgccccuccaucuccaccaccuggcagcagaaagagaagaaggccuguccugccuagcagcagcgagucugagggcaagccugauacagagagcgagagcagcagcacagagagcagcgaggacgaagcuggcgaucuuagaggcggcagaagaagaagccccagagaacucggcggcagauacuuccuggaucugagcgccgagagcaccaccggcacugaaucugaaggcacaggccccagcgacgacgaugacgaugaugccucugauggcuggcugguggacaccccuccuagaaaguccaagcggcccagaaucaaccugcggcugacaagcucuccugaucgcagagcuggcgugguguuccccgaaguguggcggaacgacagaccuaucagagccgcucagccucaggcuccugcucagucuagcggagauagagcugccgcuccuagaagaucugccagacaggcccagaugagaagcggagcugcuuggacacuggaccugcacuacauccggcagugcgugaaccagcuguuccggauccuucgggcugccccuaauccaccuggcuccgccaauagacugagacaccuugugcgggacugcuaccugaugggcuacugcagaacaagacugggccccagaacauggggcagacugcugcaaaucucuggcggcacaugggacgugcggcugagaaacgccauuagagagguggaagccagauucgagccagccgcugagccugugugugaacugccuugucugaacgcucggagauacggccccgagugugaugugggcaaccuggaaacaaauggcggcagcaccuccgacgacgagaucucugaugccaccgacagcgacgauacacuggccagccacagcgauacagaaggcggaccaucuccugccggaagagagaauccugagucugccucuggcggagcuaucgccgcaagacuggaaugcgaguucggcaccuucgacuggacaagcgaggaaggcucucagccuuggcugucugcugugguggccgauaccucuagcgccgaaagaucuggacuuccugcuccuggcgccugcagagcuacagaagcuccugaaagagaggacggcugcagaaagaugcgguucccugccgccuguccuuauccuugcggccacacauuucugcggccu

SEQ ID NO: 307 - protein, 168 aa, Classical swine fever virus
MELNHFELLYKTSKQKPVGVEEPVYDTAGRPLFGNPSEVHPQSTLKLPHDRGRGDIRTTLRDLPRKGDCRSGNHLGPVSGIYIKPGPVYYQDYTGPVYHRAPLEFFDEAQFCEVTKRIGRVTGSDGKLYHIYVCVDGCILLKLAKRGTPRTLKWIRNFTNCPLWVTSC

SEQ ID NO: 308 - DNA, 504 bp, Classical swine fever virus
atggagttgaatcattttgaattattatacaaaacaagcaaacaaaaaccagtgggagtggaggaaccggtgtatgacaccgcggggagaccactatttgggaacccaagtgaggtacacccacaatcaacgctgaagctgccacacgacagggggagaggagatatcagaacaacactgagggacctacccaggaaaggtgactgtaggagtggcaaccatctaggcccggttagtgggatatacataaagcccggccctgtctactatcaggactacacgggcccagtctatcacagagctcctttagagttctttgatgaggcccagttctgcgaggtgactaagagaataggcagggtcacgggtagtgatggtaagctttaccacatatatgtgtgcgtcgatggttgcatactgctgaaattagccaaaaggggcacacccagaaccctaaagtggattaggaacttcaccaactgtccattatgggtaaccagttgc

SEQ ID NO: 309 - DNA, 504 bp, Artificial Sequence
  Codon optimised DNA encoding CSFV NPro protein
atggaactgaaccacttcgagctgctgtacaagaccagcaagcagaaacccgtgggcgtcgaggaacccgtgtatgatacagctggcagacccctgttcggcaacccctctgaagtgcaccctcagagcacactgaagctgccccacgatagaggcagaggcgacatcagaaccacactgcgggacctgcctagaaagggcgattgcagaagcggcaatcatctgggccctgtgtccggcatctacatcaagcctggaccagtgtactaccaggactacacaggccccgtgtaccacagagcccctctggaattcttcgacgaggcccagttctgcgaagtgaccaagagaatcggcagagtgaccggctccgacggcaagctgtaccacatctacgtgtgcgtggacggctgcatcctgctgaagctggccaagagaggcacccctagaacactgaagtggatccggaacttcaccaactgtcctctgtgggtcaccagctgc

SEQ ID NO: 310 - RNA, 504 nt, Artificial Sequence
  Codon optimised RNA encoding CSFV NPro protein
auggaacugaaccacuucgagcugcuguacaagaccagcaagcagaaacccgugggcgucgaggaacccguguaugauacagcuggcagaccccuguucggcaaccccucugaagugcacccucagagcacacugaagcugccccacgauagaggcagaggcgacaucagaaccacacugcgggaccugccuagaaagggcgauugcagaagcggcaaucaucugggcccuguguccggcaucuacaucaagccuggaccaguguacuaccaggacuacacaggccccguguaccacagagccccucuggaauucuucgacgaggcccaguucugcgaagugaccaagagaaucggcagagugaccggcuccgacggcaagcuguaccacaucuacgugugcguggacggcugcauccugcugaagcuggccaagagaggcaccccuagaacacugaaguggauccggaacuucaccaacuguccucugugggucaccagcugc

SEQ ID NO: 311 - protein, 168 aa, Border disease virus
MELNKFELLYKTSKQRPVGAVEPVYDSAGNPLYGERTTVHPQATLKLPHHRGVAEVITTLKDLPRKGDCRSGNHRGPVSGIYIKPGPVIYQDYKRPVYHRAPLEQFTKVQICEATKRVGRVTGSDGKLYHLYVCMDGCILLKLASRTVNAVLKWTHNTLDCPLWVTSC

SEQ ID NO: 312 - DNA, 504 bp, Border disease virus
atggagttgaataagtttgaacttttatacaaaacaagtaaacaaagaccagtaggggctgttgaaccagtttatgactcagcgggtaaccccctatatggtgaaagaacaacagtacacccgcaagccactctgaaactaccacatcacaggggagtagccgaggtgataacaaccctgaaggatttgcccaggaaaggagactgcaggagtggaaaccatcgaggcccagtgagtggtatatacatcaagccaggtccagtcatataccaggattacaagagaccggtgtaccacagggctcctctggagcagttcacgaaggtacaaatctgtgaggctacgaaaagggtggggagagtcactggcagcgatggcaaattgtaccacctatacgtttgcatggatggttgcatattgctgaaactggcaagcaggaccgtgaatgcagtgctaaaatggacacataacactctggactgtccactttgggttacaagctgc

SEQ ID NO: 313 - DNA, 504 bp, Artificial Sequence
  Codon optimised DNA encoding BDV Npro protein
atggaactgaacaagttcgagctgctgtacaagaccagcaagcagaggcctgtgggagccgtggaacctgtgtatgatagcgccggcaatcccctgtacggcgagagaacaacagtgcaccctcaggccacactgaagctgcctcatcatagaggcgtggccgaagtgatcacaaccctgaaggacctgcctcggaagggcgattgcagaagcggcaatcacagaggccctgtgtccggcatctacatcaagcccggacctgtgatctaccaggactacaagcggcccgtgtaccacagagcacccctggaacagttcaccaaggtgcagatttgcgaggccaccaagcgcgtgggaagagtgacaggctctgacggcaagctgtaccacctgtacgtgtgcatggacggctgcatcctgctgaaactggccagcagaaccgtgaacgccgtgctgaagtggacccacaacaccctggattgccctctgtgggtcaccagctgt

SEQ ID NO: 314 - RNA, 504 nt, Artificial Sequence
  Codon optimised RNA encoding BDV Npro protein
auggaacugaacaaguucgagcugcuguacaagaccagcaagcagaggccugugggagccguggaaccuguguaugauagcgccggcaauccccuguacggcgagagaacaacagugcacccucaggccacacugaagcugccucaucauagaggcguggccgaagugaucacaacccugaaggaccugccucggaagggcgauugcagaagcggcaaucacagaggcccuguguccggcaucuacaucaagcccggaccugugaucuaccaggacuacaagcggcccguguaccacagagcaccccuggaacaguucaccaaggugcagauuugcgaggccaccaagcgcgugggaagagugacaggcucugacggcaagcuguaccaccuguacgugugcauggacggcugcauccugcugaaacuggccagcagaaccgugaacgccgugcugaaguggacccacaacacccuggauugcccucugugggucaccagcugu

SEQ ID NO: 315 - protein, 491 aa, Bovine rotavirus A
MATFKDACYHYKKLNKLNSLVLKLGANDEWRPAPVTKYKGWCLDCCQYTNLTYCRGCALYHVCQWCSQYNRCFLDEEPHLLRMRTFKDVVTKEDIEGLLTMYETLFPINEKLVNKFINSVKQRKCRNEYLLEWYNHLLMPITLQALTINLEDNVYYMFGYYDCMEHENQTPFQFVNLLEKYDKLLLDDRNFHRMSHLPVILQQEYALRYFSKSRFLSKGKKRLSRSDFSDNLMEDRHSPTSLMQVVRNCISIHIDDCEWNKACTLIVDARNYISIMNSSYTEHYSVSQRCKLFTKYKFGIVSKLVKPNYIFSSHESCALNVHNCKWCQINNHYKVWEDFRLRKIYNNVMDFIRALVKSNVNVGHCSSQESVYKYVPDLFLICKTEKWSEAVEMLFNYLEPVNVNGTEYVLLDYEVNWEVRGLVMQNMDGKVPRILNMNDTKKILSAMIFDWFDTRYMRETPMTTSTTNQLRTLNKRNELIDEYDLELSDVE

SEQ ID NO: 316 - DNA, 1473 bp, Bovine rotavirus A
atggcgacttttaaggacgcttgttatcattataaaaagttgaataaattaaatagtttagtgctcaaactaggagcaaatgatgaatggaggccagcaccagtgacaaaatataaaggatggtgtttagattgttgtcaatatacaaatttgacatattgcagagggtgcgctctataccatgtatgtcagtggtgcagtcagtataacaggtgtttcttagatgaagaaccccatttgctgagaatgcgaacatttaaagatgtagtaacaaaagaagatatagaaggactgctaaccatgtatgaaacgttgtttccaataaatgaaaagttagtgaataaattcataaactctgtgaagcagcgtaagtgtaggaatgagtatttgttagaatggtataaccacttactaatgccaataacattgcaagcattgactataaatcttgaggataatgtatattatatgtttggatactatgattgcatggagcatgaaaaccaaacaccattccaatttgttaacctactagaaaaatatgataaattgctactagatgatagaaatttccatagaatgtcacacttaccagtaatattgcaacaagagtatgcgttgagatatttttcaaaatcaagatttttaagtaaagggaagaaaagattgagtaggagtgatttctcagataatcttatggaagatagacatagtccaacatcattaatgcaagtggtacgtaactgcatcagtatacacatagatgattgtgaatggaataaagcgtgtacgcttatagttgatgctagaaattatattagtattatgaattcatcgtatactgagcattacagtgtgtcacaaagatgtaaactgttcactaagtataaatttgggattgtatcaaaattggtgaaaccgaattacattttttctagccatgaatcatgcgcattaaacgtacacaattgtaaatggtgtcagatcaataaccattacaaagtgtgggaagattttagacttaggaaaatatacaataatgtaatggattttatcagggcacttgtgaaatcgaatgtaaacgttggacattgttcatcacaggaatcagtgtataagtatgtaccggatttatttttaatttgtaaaacggaaaaatggagcgaagctgtcgaaatgttatttaattatctagaaccagtgaacgtaaatggaacggagtatgtattattagactatgaagtgaactgggaagtgaggggactagtcatgcaaaacatggacgggaaagtaccaagaattttgaatatgaatgatacaaagaagatactgagtgcaatgatatttgactggtttgacacaagatatatgagagaaacaccaatgacgacgtcaacaacaaaccaacttcgaacactgaacaaaaggaatgagctcatagatgagtacgatttagaactttcagatgttgaa

SEQ ID NO: 317 - DNA, 1473 bp, Artificial Sequence
  Codon optimised DNA encoding Bovine RV NS1 protein
atggccaccttcaaggacgcctgctaccactacaagaagctgaacaagctgaatagcctggtgctgaagctgggcgccaatgatgaatggcgacctgctcctgtgaccaagtacaaaggctggtgcctggactgctgccagtacaccaatctgacctactgcagaggctgcgccctgtaccacgtctgtcagtggtgcagccagtacaaccggtgcttcctggacgaggaaccccatctgctgcggatgcggacctttaaggacgtggtcaccaaagaggacatcgagggcctgctgactatgtacgagacactgttccccatcaacgagaagctggtcaacaagttcatcaacagcgtgaagcagcggaagtgccggaacgagtacctgctggaatggtacaatcatctgctgatgcccatcacactgcaggccctgaccatcaacctggaagataacgtgtactacatgttcggctactacgactgcatggaacacgagaatcagacccctttccagttcgtgaacctgctcgagaagtacgacaagctgctgctggacgaccggaacttccaccggatgtctcatctgcccgtgatcctgcagcaagagtacgccctgcggtacttcagcaagagccggtttctgagcaagggcaagaagcggctgagcagaagcgacttcagcgacaacctgatggaagatcggcacagccccaccagcctgatgcaggtcgtcagaaactgcatcagcatccacatcgacgactgtgaatggaacaaggcctgcacactgatcgtggacgcccgcaactacatctccatcatgaacagcagctacaccgagcactacagcgtgtcccagcggtgcaagctgttcacaaagtacaagttcggcatcgtgtccaagctcgtgaagcccaattacatcttcagcagccacgagagctgtgccctgaacgtgcacaactgcaagtggtgccagatcaacaatcactacaaagtgtgggaagatttccggctgcggaagatctacaacaacgtgatggacttcatccgcgctctggtcaagagcaacgtgaacgtgggccactgcagcagccaagagtccgtgtacaaatacgtgcccgacctgttcctgatctgcaagaccgagaagtggagcgaggccgtggaaatgctgttcaactacctggaacctgtgaacgtcaacggcaccgagtacgtcctgctggactacgaagtgaactgggaagtgcggggcctcgtgatgcagaacatggatggcaaggtgccccggatcctgaacatgaacgacaccaagaaaatcctgagcgccatgatcttcgattggttcgacacccggtacatgcgcgagacacctatgaccaccagcaccaccaaccagctgcggaccctgaacaagagaaacgagctgatcgacgagtacgacctggaactgagcgacgtggaa

SEQ ID NO: 318 - RNA, 1473 nt, Artificial Sequence
  Codon optimised RNA encoding Bovine RV NS1 protein
auggccaccuucaaggacgccugcuaccacuacaagaagcugaacaagcugaauagccuggugcugaagcugggcgccaaugaugaauggcgaccugcuccugugaccaaguacaaaggcuggugccuggacugcugccaguacaccaaucugaccuacugcagaggcugcgcccuguaccacgucugucaguggugcagccaguacaaccggugcuuccuggacgaggaaccccaucugcugcggaugcggaccuuuaaggacguggucaccaaagaggacaucgagggccugcugacuauguacgagacacuguuccccaucaacgagaagcuggucaacaaguucaucaacagcgugaagcagcggaagugccggaacgaguaccugcuggaaugguacaaucaucugcugaugcccaucacacugcaggcccugaccaucaaccuggaagauaacguguacuacauguucggcuacuacgacugcauggaacacgagaaucagaccccuuuccaguucgugaaccugcucgagaaguacgacaagcugcugcuggacgaccggaacuuccaccggaugucucaucugcccgugauccugcagcaagaguacgcccugcgguacuucagcaagagccgguuucugagcaagggcaagaagcggcugagcagaagcgacuucagcgacaaccugauggaagaucggcacagccccaccagccugaugcaggucgucagaaacugcaucagcauccacaucgacgacugugaauggaacaaggccugcacacugaucguggacgcccgcaacuacaucuccaucaugaacagcagcuacaccgagcacuacagcgugucccagcggugcaagcuguucacaaaguacaaguucggcaucguguccaagcucgugaagcccaauuacaucuucagcagccacgagagcugugcccugaacgugcacaacugcaaguggugccagaucaacaaucacuacaaagugugggaagauuuccggcugcggaagaucuacaacaacgugauggacuucauccgcgcucuggucaagagcaacgugaacgugggccacugcagcagccaagaguccguguacaaauacgugcccgaccuguuccugaucugcaagaccgagaaguggagcgaggccguggaaaugcuguucaacuaccuggaaccugugaacgucaacggcaccgaguacguccugcuggacuacgaagugaacugggaagugcggggccucgugaugcagaacauggauggcaaggugccccggauccugaacaugaacgacaccaagaaaauccugagcgccaugaucuucgauugguucgacacccgguacaugcgcgagacaccuaugaccaccagcaccaccaaccagcugcggacccugaacaagagaaacgagcugaucgacgaguacgaccuggaacugagcgacguggaa

SEQ ID NO: 319 - protein, 317 aa, Bovine rotavirus A
MAELACFCYPHLESDTYRFIPFNSLAIKCMLTAKVDKKDQDKFYNSIIYGIAPPPQFKKRYNTNDNSRGMNYETPMFNKVAVLICEALNSIKVTQSDVASVLSKVISVRHLENLVLRRENHQDVLFHSKELLLRSVLIAIGHSKEIETTATAEGGEVVFQNAAFTMWKLTYLEHRLMPILDQNFIEYKITVNEDKPISESHVRELIAELRWQYNKFAVITHGKGHYRVVKYSSVANHADRVYATFKSNNKNGNVIEFNLLDQRIIWQNWYAFTSSMKQGNTLEICKKLLFQKMKRESNPFKGLSTDRKMDEVSQIGI

SEQ ID NO: 320 - DNA, 951 bp, Bovine rotavirus A
atggctgagctagcttgcttttgttatccccatttggagagcgatacgtatagattcattccatttaacagtttagctataaaatgtatgttgacagcaaaagtggacaaaaaagatcaggataagttttacaattcaataatttatggcattgcaccaccgccacagttcaaaaaacgttataacacaaatgataattcgagaggaatgaattatgaaactccaatgtttaataaagtggcggtattaatttgtgaagcgttgaattcaattaaagttactcaatctgatgttgcgagtgtactttcaaaagtaatttctgtaagacatttagagaatttggtactgagaagagagaaccatcaggacgtgcttttccattcaaaagagttgttgctgagatcagtactaatagctattggtcactcaaaagaaattgaaacaactgccactgctgaaggaggggaagtagtttttcaaaatgcagcttttacaatgtggaaactgacatacctggagcatagactaatgccaattttggatcaaaattttatcgaatataaaataacagtgaatgaagataaaccaatttcagaatcacatgtaagagaactcattgctgaattgcggtggcaatacaacaaatttgcagtaattacacatggtaaaggtcactacagagttgtaaaatattcatcagttgcgaatcatgcagatagagtttacgctactttcaagagcaataataagaatgggaatgtgatagagtttaatctacttgatcaaagaataatatggcagaactggtatgcgtttacatcctcaatgaaacaaggcaacactcttgaaatatgcaagaaactactgttccaaaagatgaagcgagaaagtaatccgtttaagggactgtcaactgatagaaagatggatgaggtctctcaaataggaatt

SEQ ID NO: 321 - DNA, 951 bp, Artificial Sequence
  Codon optimised DNA encoding Bovine RV NS2 protein
atggccgagctggcctgcttttgttaccctcacctggaaagcgatacctaccggttcatccccttcaacagcctggccatcaagtgcatgctgaccgccaaggtggacaagaaggaccaggacaagttctacaacagcatcatctacggaatcgcccctccacctcagttcaagaagcggtacaacaccaacgacaacagccggggcatgaactacgagacacccatgttcaacaaggtggccgtgctgatctgcgaggccctgaactccatcaaagtgacccagtccgatgtggccagcgtgctgagcaaagtgatctctgtgcggcacctcgagaacctggtgctgcggagagaaaaccaccaggacgtgctgttccacagcaaagagctgctgctgagatctgtgctgatcgccatcggccactccaaagagatcgagacaaccgccacagccgaaggcggagaggtggtgtttcagaatgccgccttcaccatgtggaagctgacctacctggaacaccggctgatgcccatcctggaccagaacttcatcgagtacaagatcaccgtgaacgaggacaagcccatcagcgagtctcacgtgcgggaactgattgccgagctgcggtggcagtacaacaagttcgccgtgatcacacacggcaagggccactacagagtggtcaagtacagcagcgtggccaaccacgccgatagagtgtacgccaccttcaagagcaacaacaagaacggcaacgtgatcgagttcaacctgctggaccagcggatcatctggcagaattggtacgcctttaccagcagcatgaagcagggcaacaccctggaaatctgcaagaagctcctgttccagaagatgaagagagagagcaaccccttcaagggcctgagcaccgaccggaagatggatgaggtgtcccagatcggcatc

SEQ ID NO: 322 - RNA, 951 nt, Artificial Sequence
  Codon optimised RNA encoding Bovine RV NS2 protein
auggccgagcuggccugcuuuuguuacccucaccuggaaagcgauaccuaccgguucauccccuucaacagccuggccaucaagugcaugcugaccgccaagguggacaagaaggaccaggacaaguucuacaacagcaucaucuacggaaucgccccuccaccucaguucaagaagcgguacaacaccaacgacaacagccggggcaugaacuacgagacacccauguucaacaagguggccgugcugaucugcgaggcccugaacuccaucaaagugacccaguccgauguggccagcgugcugagcaaagugaucucugugcggcaccucgagaaccuggugcugcggagagaaaaccaccaggacgugcuguuccacagcaaagagcugcugcugagaucugugcugaucgccaucggccacuccaaagagaucgagacaaccgccacagccgaaggcggagaggugguguuucagaaugccgccuucaccauguggaagcugaccuaccuggaacaccggcugaugcccauccuggaccagaacuucaucgaguacaagaucaccgugaacgaggacaagcccaucagcgagucucacgugcgggaacugauugccgagcugcgguggcaguacaacaaguucgccgugaucacacacggcaagggccacuacagaguggucaaguacagcagcguggccaaccacgccgauagaguguacgccaccuucaagagcaacaacaagaacggcaacgugaucgaguucaaccugcuggaccagcggaucaucuggcagaauugguacgccuuuaccagcagcaugaagcagggcaacacccuggaaaucugcaagaagcuccuguuccagaagaugaagagagagagcaaccccuucaagggccugagcaccgaccggaagauggaugaggugucccagaucggcauc

SEQ ID NO: 323 - protein, 228 aa, Porcine bocavirus 1
MSSARSDTDTGRRGKRSRSRSRSRDRDQAPGLPPKKRDYRRRSGERGSESSPDRSTRGSPSCSTASRTSRVTSATWRRPNDSRDGGKIWGNKNKKNKTNPYEVFSQHMARFKPDKSYCGFYWHSCRMARKGTDYIFTEGMRDFQKRCKDNKCEWKDVREIMFGLKKVLDQGYRNMMYHFRHTQCEKCNYWDEVYKMHLANVSPSETEPQELTDEEILAAAMEVDGTHE

SEQ ID NO: 324 - DNA, 684 bp, Porcine bocavirus 1
atgagctcagcgagatccgacacagacacaggcaggagagggaagcggtcgaggagccggtcgaggagccgcgaccgggaccaagcaccggggctgcctccgaaaaaaagggactatcgccgtcggagtggggagagaggctcggagtcctcaccagatcgctcgacgagggggagcccatcgtgctccactgcttcgagaacatcccgagtgacttcagcgacatggaggagaccgaatgactctcgggacggggggaaaatatggggaaataaaaataaaaagaataaaacaaacccttacgaggtattcagccagcacatggccaggttcaagccagataaaagctattgtggcttctactggcacagctgccggatggctcgtaagggcacagattatatctttaccgagggaatgagggatttccaaaaacgctgtaaagacaataaatgtgagtggaaagatgtcagggagatcatgttcggcctcaaaaaggtcttagatcagggatatagaaatatgatgtatcactttagacatacccagtgtgagaaatgtaactactgggatgaagtgtataaaatgcacctggctaacgtgtctccttctgaaacagaaccgcaggaactgacagacgaggagatattagccgcggccatggaggtcgatggcacccacgaa

SEQ ID NO: 325 - DNA, 684 bp, Artificial Sequence
  Codon optimised DNA encoding PBoV NP1 protein
atgagcagcgccagaagcgataccgacacaggcagacggggcaagagaagcagaagccggtccagaagcagagacagagatcaggctcctggcctgcctcctaagaagcgggactacagaagaagatccggcgagagaggcagcgagagcagccctgatagaagcacaagaggcagccctagctgtagcaccgccagcagaacaagcagagtgacctctgccacttggcggaggcccaacgattctagagatggcggcaagatctggggcaacaagaacaagaagaacaaaacgaacccctacgaggtgttcagccagcacatggccagattcaagcccgacaagagctactgcggcttctactggcacagctgccggatggccagaaagggcaccgactacatcttcaccgagggcatgagagacttccagaagcggtgcaaggacaacaagtgcgagtggaaggacgtgcgcgagatcatgttcggcctgaagaaggtgctggaccagggctacagaaacatgatgtaccacttccggcacacccagtgcgagaagtgcaactactgggacgaagtgtacaagatgcacctggccaacgtgtccccatccgagacagagcctcaagagctgaccgacgaggaaattctggccgctgccatggaagtggatggcacacatgaa

SEQ ID NO: 326 - RNA, 684 nt, Artificial Sequence
  Codon optimised RNA encoding PBoV NP1
augagcagcgccagaagcgauaccgacacaggcagacggggcaagagaagcagaagccgguccagaagcagagacagagaucaggcuccuggccugccuccuaagaagcgggacuacagaagaagauccggcgagagaggcagcgagagcagcccugauagaagcacaagaggcagcccuagcuguagcaccgccagcagaacaagcagagugaccucugccacuuggcggaggcccaacgauucuagagauggcggcaagaucuggggcaacaagaacaagaagaacaaaacgaaccccuacgagguguucagccagcacauggccagauucaagcccgacaagagcuacugcggcuucuacuggcacagcugccggauggccagaaagggcaccgacuacaucuucaccgagggcaugagagacuuccagaagcggugcaaggacaacaagugcgaguggaaggacgugcgcgagaucauguucggccugaagaaggugcuggaccagggcuacagaaacaugauguaccacuuccggcacacccagugcgagaagugcaacuacugggacgaaguguacaagaugcaccuggccaacguguccccauccgagacagagccucaagagcugaccgacgaggaaauucuggccgcugccauggaaguggauggcacacaugaa

SEQ ID NO: 327 - protein, 114 aa, Hepatitis E virus
MGSRPCALGLFCCCSSCFCLCCPRHRPVSRLAAVVGGAAAVPAVVSGVTGLILSPSQSPIFIQPTPSPPMSPLRPGLDLVFANPPDHSAPLGVTRPSAPPLPHVVDLPQLGPRR

SEQ ID NO: 328 - DNA, 342 bp, Hepatitis E virus
atgggttcgcgaccatgcgccctcggcctattttgttgctgctcctcatgtttttgcctatgctgcccgcgccaccgcccggtcagccgtctggccgccgtcgtgggcggcgcagcggcggttccggcggtggtttctggggtgaccgggttgattctcagcccttcgcaatcccctatattcatccaaccaaccccttcgcccccgatgtcaccgctgcggccggggctggacctcgtgttcgccaacccgcccgaccactcggctccgcttggcgtgaccaggcccagcgccccgccgttgcctcacgtcgtagacctaccacagctggggccgcgccgc

SEQ ID NO: 329 - DNA, 342 bp, Artificial Sequence
  Codon optimised DNA encoding Hepatitis E Orf3 protein
atgggcagcagaccttgtgctctgggcctgttctgctgctgcagctcctgcttctgcctgtgctgccctagacacagacccgtgtctagactggccgctgttgttggcggagctgctgctgttccagctgtggtgtctggcgtgacaggcctgattctgagcccttctcagagccccatcttcatccagcctacacctagtcctccaatgagccctctgaggcctggactggatctggtgttcgccaatcctcctgatcactctgcccctctgggcgtgacaagaccttctgctcctcctctgccacacgtggtggatctgcctcaactgggccctagaaga

SEQ ID NO: 330 - RNA, 342 nt, Artificial Sequence
  Codon optimised RNA encoding Hepatitis E Orf3 polypeptide
augggcagcagaccuugugcucugggccuguucugcugcugcagcuccugcuucugccugugcugcccuagacacagacccgugucuagacuggccgcuguuguuggcggagcugcugcuguuccagcuguggugucuggcgugacaggccugauucugagcccuucucagagccccaucuucauccagccuacaccuaguccuccaaugagcccucugaggccuggacuggaucugguguucgccaauccuccugaucacucugccccucugggcgugacaagaccuucugcuccuccucugccacacgugguggaucugccucaacugggcccuagaaga

SEQ ID NO: 331 - protein, 496 aa, Rotavirus A
MATFKDACFHYRRLTALNRRLCNIGANSICMPVPDAKIKGWCLECCQIADLTHCYGCSLPHVCKWCVQNRRCFLDNEPHLLKLRTVKHPITKDKLQCIIDLYNIIFPINDKVIRKFERMIKQRKCRNQYKIEWYNHLLLPITLNAAAFKFDENNLYYVFGLYEKSVSDIYAPYRIVNFINEFDKLLLDDINFTRMSNLPIELRNHYAKKYFQLSRLPSSKLKQIYFSDFTKETVIFNTYTKTPGRSIYRNVTEFNWRDELELYSDLKNDKNKLIAAMMTSKYTRFYAHDNNFGRLKMTIFELGHHCQPNYVASNHPGNASDIQYCKWCNIKYFLSKIDWRIRDMYNLLMEFIKDCYKSNVNVGHCSSVENIYPLIKRLIWSLFTNHMDQTIEEVFNHMSPVSVEGTNVIMLILGLNISLYNEIKRTLNVDSIPMVLNLNEFSSIVKSISSKWYNVDELDKLPMSIKSTEELIEMKNSGTLTEEFELLISNSEDDNE

SEQ ID NO: 332 - DNA, 1488 bp, Rotavirus A
atggctacttttaaagatgcatgctttcattatcgtagattaactgctttaaatcggagattatgcaacattggtgcaaattctatttgcatgccagttcctgatgcgaagattaaggggtggtgtttagaatgttgtcaaatagctgatttaacccattgttatggttgctcattgccgcatgtttgcaaatggtgtgttcagaacagaagatgcttccttgacaatgaacctcatttgcttaagcttagaactgtgaaacatccaattaccaaagacaaattacagtgtatcatagacttgtacaatataatatttccaattaatgataaagtaattagaaaatttgaaagaatgataaagcaaagaaaatgtaggaatcaatataaaattgaatggtataatcatttgctgctcccaattacattaaatgctgctgcatttaagtttgatgaaaataatctttattatgtttttgggttatatgagaaatcagtcagtgatatatatgctccatatagaattgttaactttataaatgaatttgataaattattgcttgatgatattaactttacaagaatgtccaatctaccaatagagttgagaaaccattatgcaaagaaatacttccaattatcaagactgccatcatcaaaactaaagcaaatttacttttcagattttactaaagaaactgtgatttttaatacttatacaaaaacgccaggaagatcaatatacagaaatgtaactgaatttaattggagagatgaattggagctttattctgatttaaaaaatgataagaataaattaattgctgcaatgatgacgagtaagtatactcggttctatgctcatgataataattttggaaggttgaaaatgacaatatttgagttgggacatcattgtcagcctaactacgtggcatctaatcacccaggcaatgcttccgatatccagtactgtaaatggtgtaatataaaatattttcttagtaaaattgattggcggattcgtgatatgtataatttattgatggaatttattaaggattgttataaaagtaatgttaacgttggacattgtagttctgttgaaaacatatatcctttaattaaaagattaatttggagtttgtttactaatcacatggatcaaacaattgaagaagtgtttaatcacatgtcgccagtgtcagttgaaggtacgaatgtcatcatgttgattcttggattgaatattagtttgtataatgaaattaagcgcactttgaatgtagatagcataccaatggtacttaatttaaatgaattcagtagtatagttaaatcaattagcagtaaatggtataatgttgatgaattggataaattgccaatgtcaataaaatcaacggaggaactgattgaaatgaagaattctggaactttaactgaagaatttgagctactgatctccaactcagaagatgacaatgag

SEQ ID NO: 333 - DNA, 1488 bp, Artificial Sequence
  Codon optimised DNA encoding Rotavirus NSP1 protein
atggccaccttcaaggacgcctgcttccactacagacggctgacagccctgaatcggcggctgtgtaatatcggcgccaacagcatctgcatgcccgtgcctgacgccaagatcaaaggctggtgcctggaatgctgccagatcgccgatctcacccactgctacggctgttctctgccccatgtgtgcaagtggtgcgtgcagaacagacggtgcttcctggacaacgagccccatctgctgaagctgagaaccgtgaagcaccccatcaccaaggacaagctgcagtgcatcatcgacctgtacaacatcatcttccccatcaacgacaaagtgatccggaagttcgagcggatgatcaagcagcggaagtgccggaaccagtacaagatcgagtggtacaatcatctgctgctgcccatcacactgaacgccgctgccttcaagttcgacgagaacaacctgtactacgtgttcggcctgtacgagaagtccgtgtccgacatctacgccccttaccggatcgtgaacttcatcaacgagttcgataagctgctgctggacgacatcaacttcacccggatgagcaacctgcctatcgagctgagaaaccactacgccaagaagtactttcagctgagcagactgcccagcagcaagctgaagcagatctacttctccgacttcaccaaagaaaccgtgatcttcaacacctacaccaagacacccggcagatccatctaccggaacgtgaccgagttcaactggcgggacgagctggaactgtacagcgacctgaagaacgacaagaacaagctgatcgccgccatgatgaccagcaagtacacccggttctacgcccacgacaacaatttcggccggctgaagatgaccatcttcgagctgggccaccactgccagcctaattacgtggcctctaatcaccccggcaacgccagcgatatccagtactgcaaatggtgcaatatcaagtacttcctgagcaagatcgactggcggatccgggacatgtacaacctgctgatggaattcatcaaggactgctacaagagcaacgtgaacgtgggccactgcagcagcgtcgagaacatctaccctctgatcaagcggctgatctggtccctgttcaccaaccacatggaccagaccatcgaagaggtgttcaatcacatgagccccgtgtccgtggaaggcaccaacgtgatcatgctgatcctgggcctgaacatcagcctgtacaatgagatcaagcgcaccctgaacgtggacagcatccccatggtgctgaacctgaacgagttcagcagcatcgtgaagtccatctccagcaagtggtataacgtggacgaactggacaaactgcccatgagcatcaagtccaccgaggaactgatcgagatgaagaacagcggcaccctgaccgaggaattcgagctgctgatctccaacagcgaggacgacaacgag

SEQ ID NO: 334 - RNA, 1488 nt, Artificial Sequence
  Codon optimised RNA encoding Rotavirus NSP1 protein
auggccaccuucaaggacgccugcuuccacuacagacggcugacagcccugaaucggcggcuguguaauaucggcgccaacagcaucugcaugcccgugccugacgccaagaucaaaggcuggugccuggaaugcugccagaucgccgaucucacccacugcuacggcuguucucugccccaugugugcaaguggugcgugcagaacagacggugcuuccuggacaacgagccccaucugcugaagcugagaaccgugaagcaccccaucaccaaggacaagcugcagugcaucaucgaccuguacaacaucaucuuccccaucaacgacaaagugauccggaaguucgagcggaugaucaagcagcggaagugccggaaccaguacaagaucgagugguacaaucaucugcugcugcccaucacacugaacgccgcugccuucaaguucgacgagaacaaccuguacuacguguucggccuguacgagaaguccguguccgacaucuacgccccuuaccggaucgugaacuucaucaacgaguucgauaagcugcugcuggacgacaucaacuucacccggaugagcaaccugccuaucgagcugagaaaccacuacgccaagaaguacuuucagcugagcagacugcccagcagcaagcugaagcagaucuacuucuccgacuucaccaaagaaaccgugaucuucaacaccuacaccaagacacccggcagauccaucuaccggaacgugaccgaguucaacuggcgggacgagcuggaacuguacagcgaccugaagaacgacaagaacaagcugaucgccgccaugaugaccagcaaguacacccgguucuacgcccacgacaacaauuucggccggcugaagaugaccaucuucgagcugggccaccacugccagccuaauuacguggccucuaaucaccccggcaacgccagcgauauccaguacugcaaauggugcaauaucaaguacuuccugagcaagaucgacuggcggauccgggacauguacaaccugcugauggaauucaucaaggacugcuacaagagcaacgugaacgugggccacugcagcagcgucgagaacaucuacccucugaucaagcggcugaucuggucccuguucaccaaccacauggaccagaccaucgaagagguguucaaucacaugagccccguguccguggaaggcaccaacgugaucaugcugauccugggccugaacaucagccuguacaaugagaucaagcgcacccugaacguggacagcauccccauggugcugaaccugaacgaguucagcagcaucgugaaguccaucuccagcaagugguauaacguggacgaacuggacaaacugcccaugagcaucaaguccaccgaggaacugaucgagaugaagaacagcggcacccugaccgaggaauucgagcugcugaucuccaacagcgaggacgacaacgag

SEQ ID NO: 335 - protein, 407 aa, Human herpesvirus 8
MAMFVRTSSSTHDEERMLPIEGAPRRRPPVKFIFPPPPLSSLPGFGRPRGYAGPTVIDMSAPDDVFAEDTPSPPATPLDLQISPDQSSGESEYDEDEEDEDEEENDDVQEEDEPEGYPADFFQPLSHLRPRPLARRAHTPKPVAVVAGRVRSSTDTAESEASMGWVSQDDGFSPAGLSPSDDEGVAILEPMAAYTGTGAYGLSPASRNSVPGTQSSPYSDPDEGPSWRPLRAAPTAIVDLTSDSDSDDSSNSPDVNNEAAFTDARHFSHQPPSSEEDGEDQGEVLSQRIGLMDVGQKRKRQSTASSGSEDVVRCQRQPNLSRKAVASVIIISSGSDTDEEPSSAVSVIVSPSSTKGHLPTQSPSTSAHSISSGSTTTAGSRCSDPTRILASTPPLCGNGAYNWPWLD

SEQ ID NO: 336 - DNA, 1221 bp, Human herpesvirus 8
atggcgatgtttgtgaggacctcgtctagcacacacgatgaagagagaatgcttccaattgaaggagcgcctcgcagacgaccccccgtgaagttcatattcccacctccacctctttcatcacttccaggatttggcaggccgcgcggctatgctggacccacggtgatagatatgtctgccccagacgacgtcttcgccgaggacacgccatcgccgccagcaacccctctggatctacagatatccccggatcagtcgagcggcgaatctgaatatgacgaggatgaggaagatgaagatgaagaagaaaatgacgatgttcaggaggaagacgagccagaggggtaccctgcagacttttttcaacctttatctcacttgcgcccgaggcctctggccagacgggcccatacgcccaaaccggtagcagtggtagcgggccgcgtgcgcagttcaacggacacggcggagtccgaggcgtccatgggatgggttagtcaggatgacggattttcccctgctgggctctcaccttcagacgacgagggggttgctatcctggaaccgatggcggcatacactgggaccggggcatacggactttcacctgcttccagaaatagtgtacctggaacacaaagttcaccatacagcgaccctgatgaagggccctcgtggcgccccctgcgcgccgcacccaccgcgatcgtcgacctgacatcggactctgatagcgatgacagttccaactctccggacgtgaacaatgaggccgcgtttaccgacgcgcgccatttttcccaccagccaccctcgtccgaggaggacggagaagaccaaggggaagtattgagtcagagaatcgggctcatggacgtgggccagaagcgcaaaaggcagtctaccgcctcctctggtagcgaggatgtggtgcgctgccagagacaaccaaacttaagccgcaaagcagtggcgtctgtgataattatatcctcggggagtgacacagacgaggagccctcgtccgccgtgagcgtgatcgtgtctccgtcgagcacaaagggtcacctcccaacccaatctcccagtacttccgcccactcgatttcatcaggaagcacaactaccgcggggtccaggtgcagcgacccaacccgcatcctggcctccacgccacccctgtgtggaaacggtgcatataactggccgtggctggac

SEQ ID NO: 337 - DNA, 1221 bp, Artificial Sequence
  Codon optimised DNA encoding KSHV ORF45 protein
atggccatgtttgtgcggaccagcagcagcacccacgacgaggaaagaatgctgcctatcgagggcgctcctcggagaaggcctcctgtgaagttcatcttcccacctccaccactgagcagcctgcctggatttggcagacctagaggctacgccggacctaccgtgatcgatatgagcgcccctgacgatgtgttcgccgaggatacaccttctccaccagccacacctctggacctgcagatcagccctgatcagtctagcggcgagagcgagtacgatgaggacgaagaggacgaggatgaggaagagaacgacgacgtccaagaggaagatgagcccgagggctaccccgccgatttctttcagcctctgtctcacctgaggcctcggcctcttgctagaagggcccacacacctaaacctgtggctgtggtggccggaagagtgcggtctagcacagatacagccgagtccgaagccagcatgggatgggtgtcacaggacgatggattcagccctgccggactgagcccttccgatgatgaaggcgtggccatcctggaacctatggccgcctatactggcacaggcgcctatggactgtctcccgccagcagaaatagcgtgccaggcacacagagcagcccctactctgatcctgatgagggcccatcttggaggccccttagagctgctcctaccgccatcgtggatctgaccagcgacagcgatagcgacgacagcagcaatagccccgacgtgaacaatgaggccgccttcacagacgcccggcacttttctcatcagcctccaagcagcgaagaggatggcgaggatcagggcgaagtgctgtctcagagaatcggcctgatggacgtgggccagaagcggaagagacagagcacagccagcagcggctctgaggatgtcgtcagatgccagagacagcccaacctgagcagaaaggccgtggccagcgtgatcatcatcagctctggcagcgacaccgatgaggaacctagctctgccgtgtccgtgatcgtgtctcctagcagcaccaagggccatctgcctacacagagccctagcacaagcgcccactctatctctagcggcagcacaacaacagccggcagcagatgcagcgaccccacaagaattctggccagcacacctcctctgtgcggcaacggcgcttacaattggccttggctggat

SEQ ID NO: 338 - RNA, 1221 nt, Artificial Sequence
  Codon optimised RNA encoding KSHV ORF45 protein
auggccauguuugugcggaccagcagcagcacccacgacgaggaaagaaugcugccuaucgagggcgcuccucggagaaggccuccugugaaguucaucuucccaccuccaccacugagcagccugccuggauuuggcagaccuagaggcuacgccggaccuaccgugaucgauaugagcgccccugacgauguguucgccgaggauacaccuucuccaccagccacaccucuggaccugcagaucagcccugaucagucuagcggcgagagcgaguacgaugaggacgaagaggacgaggaugaggaagagaacgacgacguccaagaggaagaugagcccgagggcuaccccgccgauuucuuucagccucugucucaccugaggccucggccucuugcuagaagggcccacacaccuaaaccuguggcugugguggccggaagagugcggucuagcacagauacagccgaguccgaagccagcaugggaugggugucacaggacgauggauucagcccugccggacugagcccuuccgaugaugaaggcguggccauccuggaaccuauggccgccuauacuggcacaggcgccuauggacugucucccgccagcagaaauagcgugccaggcacacagagcagccccuacucugauccugaugagggcccaucuuggaggccccuuagagcugcuccuaccgccaucguggaucugaccagcgacagcgauagcgacgacagcagcaauagccccgacgugaacaaugaggccgccuucacagacgcccggcacuuuucucaucagccuccaagcagcgaagaggauggcgaggaucagggcgaagugcugucucagagaaucggccugauggacgugggccagaagcggaagagacagagcacagccagcagcggcucugaggaugucgucagaugccagagacagcccaaccugagcagaaaggccguggccagcgugaucaucaucagcucuggcagcgacaccgaugaggaaccuagcucugccguguccgugaucgugucuccuagcagcaccaagggccaucugccuacacagagcccuagcacaagcgcccacucuaucucuagcggcagcacaacaacagccggcagcagaugcagcgaccccacaagaauucuggccagcacaccuccucugugcggcaacggcgcuuacaauuggccuuggcuggau

SEQ ID NO: 339 - protein, 245 aa, Epstein-Barr virus
MMDPNSTSEDVKFTPDPYQVPFVQAFDQATRVYQDLGGPSQAPLPCVLWPVLPEPLPQGQLTAYHVSTAPTGSWFSAPQPAPENAYQAYAAPQLFPVSDITQNQQTNQAGGEAPQPGDNSTVQTAAAVVFACPGANQGQQLADIGVPQPAPVAAPARRTRKPQQPESLEECDSELEIKRYKNRVASRKCRAKFKQLLQHYREVAAAKSSENDRLRLLLKQMCPSLDVDSIIPRTPDVLHEDLLNF

SEQ ID NO: 340 - DNA, 735 bp, Epstein-Barr virus
atgatggacccaaactcgacttctgaagatgtaaaatttacacctgacccataccaggtgccttttgtacaagcttttgaccaagctaccagagtctatcaggacctgggagggccatcgcaagctcctttgccttgtgtgctgtggccggtgctgccagagcctctgccacaaggccagctaactgcctatcatgtttcaaccgctccgactgggtcgtggttttctgcccctcagcctgctcctgagaatgcttatcaagcttatgcagcacctcagctgttcccagtctccgacataacccagaatcaacagactaaccaagccgggggagaagcacctcaacctggagacaattctactgttcaaacagcagcagcagtggtgtttgcttgccccggggctaaccaaggacaacagctagcagacattggtgttccacagcctgcaccagtggctgccccggcacgacgcacacggaaaccacaacagccagaatcgctggaggaatgcgattctgaactagaaataaagcgatacaagaatcgggtggcttccagaaaatgccgggccaagtttaagcaactgctgcagcactaccgtgaggtcgctgctgccaaatcatctgaaaatgacaggctgcgcctcctgttgaagcagatgtgcccaagcctggatgttgactccattatcccccggacaccagatgttttacacgaggatctcttaaatttc

SEQ ID NO: 341 - DNA, 735 bp, Artificial Sequence
  Codon optimised DNA encoding EBV BZLF-1 protein
atgatggaccccaacagcaccagcgaggacgtgaagttcacccctgatccttaccaggtgccattcgtgcaggccttcgatcaggccaccagagtgtaccaggatctcggcggaccttctcaggctcctctgccttgtgttctgtggcctgtgctgcctgaacctctgcctcagggacagctgacagcctaccatgtgtctacagcccctaccggcagctggttttctgctcctcaacctgctcctgagaacgcctaccaggcctatgctgcccctcagctgtttcccgtgtccgacatcacccagaaccagcagacaaatcaggctggcggagaagctcctcagcctggcgataatagcaccgtgcagacagctgccgccgtggtgtttgcttgtcctggcgctaatcagggccagcagctggctgatattggcgtgccacaaccagctccagtggccgctcctgccagaagaacaagaaagcctcagcagcccgagagcctggaagagtgcgatagcgagctggaaatcaagcggtacaagaacagagtggccagccggaagtgccgggccaagtttaaacagctgctccagcactacagagaggtggccgctgccaagagcagcgagaacgatagactgcggctgctgctgaagcagatgtgccctagcctggacgtggacagcatcatccccagaacacccgatgtgctgcacgaggacctgctgaacttt

SEQ ID NO: 342 - RNA, 735 nt, Artificial Sequence
  Codon optimised RNA encoding EBV BZLF-1
augauggaccccaacagcaccagcgaggacgugaaguucaccccugauccuuaccaggugccauucgugcaggccuucgaucaggccaccagaguguaccaggaucucggcggaccuucucaggcuccucugccuuguguucuguggccugugcugccugaaccucugccucagggacagcugacagccuaccaugugucuacagccccuaccggcagcugguuuucugcuccucaaccugcuccugagaacgccuaccaggccuaugcugccccucagcuguuucccguguccgacaucacccagaaccagcagacaaaucaggcuggcggagaagcuccucagccuggcgauaauagcaccgugcagacagcugccgccgugguguuugcuuguccuggcgcuaaucagggccagcagcuggcugauauuggcgugccacaaccagcuccaguggccgcuccugccagaagaacaagaaagccucagcagcccgagagccuggaagagugcgauagcgagcuggaaaucaagcgguacaagaacagaguggccagccggaagugccgggccaaguuuaaacagcugcuccagcacuacagagagguggccgcugccaagagcagcgagaacgauagacugcggcugcugcugaagcagaugugcccuagccuggacguggacagcaucauccccagaacacccgaugugcugcacgaggaccugcugaacuuu

SEQ ID NO: 343 - protein, 314 aa, Murine herpesvirus 4
MPTSPPTTRNTTSGKTRSGCKRRCFNKPAAMPPKRRRAPKRPAPPPPPGCQGDEESSQGTQTPNPPSPPVPPSSPTLPSSPVPPSSPVHEPPSPSPPPAPPSPDVDVEGLDVGETDDPGPPPPKRYSRYQKPHNPSDPLPKKYQGMRRHLQVTAPRLFDPEGHPPTHFKSAVMFSSTHPYTLNKLHKCIQSKHVLSTPVSCLPLVPGTTQQCVTYYLLSFVEDKKQAKKLKRVVLAYCEKYHSSVEGTIVKAKPYFPLPEPPTEPPTDPEQPSTSTQASGTQHGPTASLDAGAEQGATGSPGSSPGQQGQGSQT

SEQ ID NO: 344 - DNA, 942 bp, Murine herpesvirus 4
atgcccacatccccaccgactacacgcaacacaacctcaggcaaaaccagatcagggtgcaaacgtaggtgcttcaacaaaccagcagccatgcctcctaaaagacgccgcgctccaaaaagaccagcccctcctccaccaccgggatgccaaggtgatgaggagtccagccagggaactcaaacgccaaaccccccatcaccaccagtgcccccttcatcaccaacacttccctcatcccccgtccctccttcatcaccagtacatgagccaccatctccttcccccccaccagccccaccatcaccagatgttgatgttgaaggtttagatgtaggagagacagacgatcccggtccccctccaccaaaaagatactccaggtatcaaaaaccgcataatccatctgatccattgcctaaaaaatatcagggaatgcgaagacacctgcaggtgacagcacccaggttatttgatcccgagggtcaccccccaacacattttaagtcagctgttatgtttagtagcacacatccctacactttgaataaacttcacaagtgtatccaaagcaaacatgtactctcaacaccagttagctgtttacccttggtaccaggcacaacacaacagtgtgtaacatactatttactttcatttgttgaagacaagaaacaggccaaaaaactaaaaagggttgtcttggcctactgtgaaaaataccacagcagcgtagaaggtactatagtcaaggcaaagccttattttcccttaccagagccccctacagagccccctacagaccccgagcagccatccacaagtacacaagcttctggcacacaacatggtcccacagcatctctggatgccggtgcagagcaaggtgccacaggatcacctggatctagtccaggacaacagggacaagggtctcagaca

SEQ ID NO: 345 - DNA, 942 bp, Artificial Sequence
  Codon optimised DNA encoding MuHV Orf73 protein
atgcctacaagccctcctaccaccagaaacaccaccagcggcaagacaagaagcggctgcaagcggcggtgcttcaacaaacctgctgccatgcctcctaagcggcggagagcacctaaaagacctgctcctcctccacctcctggttgccaaggcgacgaggaatcttctcagggcacccagacacctaatcctccatctccacctgtgcctccaagcagccctacactgccatcttctccagtgccacctagcagcccagtgcacgaaccacctagtccaagtcctccaccagctccaccttctccagacgtggacgtggaaggactggatgtgggcgagacagacgatcctggacctccaccacctaagcggtacagcagataccagaagcctcacaaccccagcgatcctctgcctaagaaataccagggcatgcgccggcatctgcaagtgacagcccctagactgttcgaccctgagggacaccctcctacacacttcaagagcgccgtgatgttcagcagcacacacccctacactctgaacaagctgcacaagtgcatccagagcaaacacgtgctgagcacccctgtgtcctgtctgcctctggtgcctggaaccacacagcagtgcgtgacctactacctgctgagcttcgtggaagataagaagcaggccaagaaactgaagagagtggtgctggcctactgcgagaagtaccacagcagcgtggaaggcaccatcgtgaaggccaagccttacttcccactgcctgagcctccaaccgagccacctacagatcctgagcagcctagcacaagcacacaggcctctggaacacagcacggacctacagctagtctggatgctggtgctgaacagggcgccacaggatcacctggaagtagccctggacagcaaggccagggatctcagaca

SEQ ID NO: 346 - RNA, 942 nt, Artificial Sequence
  Codon optimised RNA encoding MuHV Orf73 protein
augccuacaagcccuccuaccaccagaaacaccaccagcggcaagacaagaagcggcugcaagcggcggugcuucaacaaaccugcugccaugccuccuaagcggcggagagcaccuaaaagaccugcuccuccuccaccuccugguugccaaggcgacgaggaaucuucucagggcacccagacaccuaauccuccaucuccaccugugccuccaagcagcccuacacugccaucuucuccagugccaccuagcagcccagugcacgaaccaccuaguccaaguccuccaccagcuccaccuucuccagacguggacguggaaggacuggaugugggcgagacagacgauccuggaccuccaccaccuaagcgguacagcagauaccagaagccucacaaccccagcgauccucugccuaagaaauaccagggcaugcgccggcaucugcaagugacagccccuagacuguucgacccugagggacacccuccuacacacuucaagagcgccgugauguucagcagcacacaccccuacacucugaacaagcugcacaagugcauccagagcaaacacgugcugagcaccccuguguccugucugccucuggugccuggaaccacacagcagugcgugaccuacuaccugcugagcuucguggaagauaagaagcaggccaagaaacugaagagaguggugcuggccuacugcgagaaguaccacagcagcguggaaggcaccaucgugaaggccaagccuuacuucccacugccugagccuccaaccgagccaccuacagauccugagcagccuagcacaagcacacaggccucuggaacacagcacggaccuacagcuagucuggaugcuggugcugaacagggcgccacaggaucaccuggaaguagcccuggacagcaaggccagggaucucagaca

SEQ ID NO: 347 - protein, 117 aa, Torque Teno virus
MWQPPTQNGTQLERHWFESVWRSHAAFCSCGDCIGHLQHLATNLGRPPAPQPPRDQHPPHIRGLPALPAPPSNRNSWPGTGGDAAGGEAGGSRGAGDGGDGELADEDLLDAIALAAE

SEQ ID NO: 348 - DNA, 351 bp, Torque Teno virus
atgtggcagccacctacccagaatggaacccaactcgaacggcactggttcgagtccgtttggcgttcgcatgctgccttttgtagctgtggcgactgtattggccatcttcagcatctggctactaacctgggtcgaccacctgctccacaaccgccgcgagaccaacacccaccgcacataagagggctcccggcactcccggcacctcccagtaacagaaactcatggcctggtactggtggagacgccgccggaggagaggctggtggaagccgaggcgcaggagatggaggagacggagagctcgcagacgaggacctgctagacgccatcgcgctcgccgcagag

SEQ ID NO: 349 - DNA, 351 bp, Artificial Sequence
  Codon optimised DNA encoding Torque Teno virus Orf2 protein
atgtggcagcctcctacacagaatggcacccagctggaacggcattggttcgagagcgtttggagaagccacgccgctttctgcagctgcggagattgcatcggacatctgcagcacctggccaccaatctgggtagacctccagctcctcagcctcctcgagatcagcaccctcctcacatcagaggactgcctgcacttcctgctcctccaagcaacagaaacagctggcctggcacaggcggagatgctgctggcggagaagctggtggatctagaggtgccggcgacggtggcgacggcgaacttgctgatgaagatctgctggacgctatcgccctggccgctgaa

SEQ ID NO: 350 - RNA, 351 nt, Artificial Sequence
  Codon optimised RNA encoding Torque Teno virus Orf2 protein
auguggcagccuccuacacagaauggcacccagcuggaacggcauugguucgagagcguuuggagaagccacgccgcuuucugcagcugcggagauugcaucggacaucugcagcaccuggccaccaaucuggguagaccuccagcuccucagccuccucgagaucagcacccuccucacaucagaggacugccugcacuuccugcuccuccaagcaacagaaacagcuggccuggcacaggcggagaugcugcuggcggagaagcugguggaucuagaggugccggcgacgguggcgacggcgaacuugcugaugaagaucugcuggacgcuaucgcccuggccgcugaa

SEQ ID NO: 351 - protein, 641 aa, Epstein-Barr virus
MSDEGPGTGPGNGLGEKGDTSGPEGSGGSGPQRRGGDNHGRGRGRGRGRGGGRPGAPGGSGSGPRHRDGVRRPQKRPSCIGCKGTHGGTGAGAGAGGAGAGGAGAGGGAGAGGGAGGAGGAGGAGAGGGAGAGGGAGGAGGAGAGGGAGAGGGAGGAGAGGGAGGAGGAGAGGGAGAGGGAGGAGAGGGAGGAGGAGAGGGAGAGGAGGAGGAGAGGAGAGGGAGGAGGAGAGGAGAGGAGAGGAGAGGAGGAGAGGAGGAGAGGAGGAGAGGGAGGAGAGGGAGGAGAGGAGGAGAGGAGGAGAGGAGGAGAGGGAGAGGAGAGGGGRGRGGSGGRGRGGSGGRGRGGSGGRRGRGRERARGGSRERARGRGRGRGEKRPRSPSSQSSSSGSPPRRPPPGRRPFFHPVGEADYFEYHQEGGPDGEPDVPPGAIEQGPADDPGEGPSTGPRGQGDGGRRKKGGWFGKHRGQGGSNPKFENIAEGLRALLARSHVERTTDEGTWVAGVFVYGGSKTSLYNLRRGTALAIPQCRLTPLSRLPFGMAPGPGPQPGPLRESIVCYFMVFLQTHIFAEVLKDAIKDLVMTKPAPTCNIRVTVCSFDDGVDLPPWFPPMVEGAAAEGDDGDDGDEGGDGDEGEEGQE

SEQ ID NO: 352 - DNA, 1926 bp, Epstein-Barr virus
atgtctgacgaggggccaggtacaggacctggaaatggcctaggagagaagggagacacatctggaccagaaggctccggcggcagtggacctcaaagaagagggggtgataaccatggacgaggacggggaagaggacgaggacgaggaggcggaagaccaggagccccgggcggctcaggatcagggccaagacatagagatggtgtccggagaccccaaaaacgtccaagttgcattggctgcaaagggacccacggtggaacaggagcaggagcaggagcgggaggggcaggagcaggaggggcaggagcaggaggaggggcaggagcaggaggaggggcaggaggggcaggaggggcaggaggggcaggagcaggaggaggggcaggagcaggaggaggggcaggaggggcaggaggggcaggagcaggaggaggggcaggagcaggaggaggggcaggaggggcaggagcaggaggaggggcaggaggggcaggaggggcaggagcaggaggaggggcaggagcaggaggaggggcaggaggggcaggagcaggaggaggggcaggaggggcaggaggggcaggagcaggaggaggggcaggagcaggaggggcaggaggggcaggaggggcaggagcaggaggggcaggagcaggaggaggggcaggaggggcaggaggggcaggagcaggaggggcaggagcaggaggggcaggagcaggaggggcaggagcaggaggggcaggaggggcaggagcaggaggggcaggaggggcaggagcaggaggggcaggaggggcaggagcaggaggaggggcaggaggggcaggagcaggaggaggggcaggaggggcaggagcaggaggggcaggaggggcaggagcaggaggggcaggaggggcaggagcaggaggggcaggaggggcaggagcaggaggaggggcaggagcaggaggggcaggagcaggaggtggaggccggggtcgaggaggcagtggaggccggggtcgaggaggtagtggaggccggggtcgaggaggtagtggaggccgccggggtagaggacgtgaaagagccagggggggaagtcgtgaaagagccagggggagaggtcgtggacgtggagaaaagaggcccaggagtcccagtagtcagtcatcatcatccgggtctccaccgcgcaggccccctccaggtagaaggccatttttccaccctgtaggggaagccgattattttgaataccaccaagaaggtggcccagatggtgagcctgacgtgcccccgggagcgatagagcagggccccgcagatgacccaggagaaggcccaagcactggaccccggggtcagggtgatggaggcaggcgcaaaaaaggagggtggtttggaaagcatcgtggtcaaggaggttccaacccgaaatttgagaacattgcagaaggtttaagagctctcctggctaggagtcacgtagaaaggactaccgacgaaggaacttgggtcgccggtgtgttcgtatatggaggtagtaagacctccctttacaacctaaggcgaggaactgcccttgctattccacaatgtcgtcttacaccattgagtcgtctcccctttggaatggcccctggacccggcccacaacctggcccgctaagggagtccattgtctgttatttcatggtctttttacaaactcatatatttgctgaggttttgaaggatgcgattaaggaccttgttatgacaaagcccgctcctacctgcaatatcagggtgactgtgtgcagctttgacgatggagtagatttgcctccctggtttccacctatggtggaaggggctgccgcggagggtgatgacggagatgacggagatgaaggaggtgatggagatgagggtgaggaagggcaggagtga

SEQ ID NO: 353 - DNA, 1926 bp, Artificial Sequence
  Codon optimised DNA encoding EBV EBNA1 protein
atgtccgatgaaggccctggaacaggccctggcaatggactgggagagaagggcgatacaagcggccctgaaggttctggcggatctggccctcaaagaagaggcggcgataatcacggcagaggacgcggaagaggtagaggcagaggcggaggtagacctggtgctcctggtggttctggctctggccctagacatagagatggcgtcagacggcctcagaagaggccttcttgtatcggctgcaagggcacacatggcggaacaggtgctggtgctggcgcaggcggagcaggcgctggtggtgcaggcgctggcggcggtgccggtgcaggcggcggagctggtggcgctggcggtgctggcggagctggtgcaggcggaggtgccggcgctggtggcggagcaggcggagctggcggagccggcgctggcggtggcgctggtgccggcggaggcgcaggcggcgctggtgctggtggtggtgctggcggcgcaggcggtgcaggcgcaggcggaggcgctggcgctggcggtggtgcaggcggtgctggcgctggcggcggtgctggcggagccggtggtgctggtgctggtggcggagctggcgctggcggagctggcggtgcaggcggcgcaggcgctggtggcgctggcgcaggcggtggcgctggcggagcaggcggagctggcgctggcggcgcaggcgcaggcggagccggtgctggcggagctggtgctggtggtgcaggcggagctggtgccggtggcgctggtggtgccggtgccggtggtgccggcggagccggcgcaggcggcggtgcaggcggagcaggcgcaggcggcggagctggtggtgccggcgcaggcggcgctggtggtgctggtgccggcggagctggtggcgcaggcgctggcggtgcaggcggtgccggtgccggtggtggtgcaggcgcaggcggtgctggtgccggcggtggcggaagaggaagaggtggtagcggaggccgaggacgaggcggaagtggtggtcgtggtagaggcggcagcggaggaagaagaggacggggtagagaacgagctagaggcggatctagagagagagcccgaggcagaggaagaggccgcggagagaaaagacctagaagccctagcagccagagcagctctagcggatctccacctagaaggccacctccaggcagacggccattctttcaccctgtgggcgaagccgactacttcgagtaccaccaagaaggcggacctgacggcgaacctgatgttcctcctggcgccattgaacagggcccagctgatgatcctggcgagggaccttctacaggccctagaggacaaggcgacggcggcagacgaaagaaaggcggatggttcggcaagcacagaggccaaggtggcagcaaccccaagttcgagaatatcgccgagggcctgagagccctgctggccagatctcacgtggaaagaaccaccgacgaaggcacatgggtggcaggcgtgttcgtttacggcggctctaagaccagcctgtacaacctgagaagaggcacagccctggccattcctcagtgcagactgacccctctgagcagactgccttttggcatggctcctggacctggacctcaacctggaccactgagagaatccatcgtgtgctacttcatggtgtttctgcagacccacatcttcgccgaggtgctgaaggacgccatcaaggacctggtcatgacaaagcccgctcctacctgcaacatcagagtgaccgtgtgcagcttcgacgacggcgttgacctgcctccttggtttcctccaatggtggaaggcgctgctgccgaaggcgacgatggcgacgacggcgacgaaggtggcgacggcgacgagggcgaagaaggacaagagtaa

SEQ ID NO: 354 - RNA, 1926 nt, Artificial Sequence
  Codon optimised RNA encoding EBV EBNA1 protein
auguccgaugaaggcccuggaacaggcccuggcaauggacugggagagaagggcgauacaagcggcccugaagguucuggcggaucuggcccucaaagaagaggcggcgauaaucacggcagaggacgcggaagagguagaggcagaggcggagguagaccuggugcuccuggugguucuggcucuggcccuagacauagagauggcgucagacggccucagaagaggccuucuuguaucggcugcaagggcacacauggcggaacaggugcuggugcuggcgcaggcggagcaggcgcugguggugcaggcgcuggcggcggugccggugcaggcggcggagcugguggcgcuggcggugcuggcggagcuggugcaggcggaggugccggcgcugguggcggagcaggcggagcuggcggagccggcgcuggcgguggcgcuggugccggcggaggcgcaggcggcgcuggugcuggugguggugcuggcggcgcaggcggugcaggcgcaggcggaggcgcuggcgcuggcgguggugcaggcggugcuggcgcuggcggcggugcuggcggagccgguggugcuggugcugguggcggagcuggcgcuggcggagcuggcggugcaggcggcgcaggcgcugguggcgcuggcgcaggcgguggcgcuggcggagcaggcggagcuggcgcuggcggcgcaggcgcaggcggagccggugcuggcggagcuggugcugguggugcaggcggagcuggugccgguggcgcugguggugccggugccgguggugccggcggagccggcgcaggcggcggugcaggcggagcaggcgcaggcggcggagcugguggugccggcgcaggcggcgcugguggugcuggugccggcggagcugguggcgcaggcgcuggcggugcaggcggugccggugccggugguggugcaggcgcaggcggugcuggugccggcgguggcggaagaggaagaggugguagcggaggccgaggacgaggcggaagugguggucgugguagaggcggcagcggaggaagaagaggacgggguagagaacgagcuagaggcggaucuagagagagagcccgaggcagaggaagaggccgcggagagaaaagaccuagaagcccuagcagccagagcagcucuagcggaucuccaccuagaaggccaccuccaggcagacggccauucuuucacccugugggcgaagccgacuacuucgaguaccaccaagaaggcggaccugacggcgaaccugauguuccuccuggcgccauugaacagggcccagcugaugauccuggcgagggaccuucuacaggcccuagaggacaaggcgacggcggcagacgaaagaaaggcggaugguucggcaagcacagaggccaagguggcagcaaccccaaguucgagaauaucgccgagggccugagagcccugcuggccagaucucacguggaaagaaccaccgacgaaggcacauggguggcaggcguguucguuuacggcggcucuaagaccagccuguacaaccugagaagaggcacagcccuggccauuccucagugcagacugaccccucugagcagacugccuuuuggcauggcuccuggaccuggaccucaaccuggaccacugagagaauccaucgugugcuacuucaugguguuucugcagacccacaucuucgccgaggugcugaaggacgccaucaaggaccuggucaugacaaagcccgcuccuaccugcaacaucagagugaccgugugcagcuucgacgacggcguugaccugccuccuugguuuccuccaaugguggaaggcgcugcugccgaaggcgacgauggcgacgacggcgacgaagguggcgacggcgacgagggcgaagaaggacaagaguaa

SEQ ID NO: 355 - protein, 201 aa, Borna disease virus
MATRPSSLVDSLEDEEDPQTLRRERPGSPRPRKVPRNALTQPVDQLLKDLRKNPSMISDPDQRTGREQLSNDELIKKLVTELAENSMIEAEEVRGTLGDISARIEAGFESLSALQVETIQTAQRCDHSDSIRILGENIKILDRSMKTMMETMKLMMEKVDLLYASTAVGTSAPMLPSHPAPPRIYPQLPSAPTTDEWDIIP

SEQ ID NO: 356 - DNA, 603 bp, Borna disease virus
atggcaacgcgaccatcgagtctggtcgactccctggaggacgaagaagatccccagacactacgacgggaacgaccggggtcaccaagaccacggaaggtcccaaggaatgcattgacccaaccagtagaccagctcctgaaggacctcaggaagaacccctccatgatctcagacccagaccagcgaaccggaagggagcagctgtcgaatgatgagctaatcaagaagttagtgacggagctggccgagaatagcatgatcgaggctgaggaggtgcggggcactcttggagacatctcggctcgtatcgaggcagggtttgagtccctgtccgccctccaagtggaaaccatccagacagctcagcggtgcgatcactccgacagcatcaggatcctcggcgagaacatcaagatactagatcgctccatgaagacaatgatggagacaatgaagctcatgatggagaaggtggatctcctctacgcatcaaccgccgttgggacctctgcacccatgttgccctcccatcctgcacctccgcgcatttatccccagctcccaagtgccccgacaacggatgaatgggacatcatacca

SEQ ID NO: 357 - DNA, 603 bp, Artificial Sequence
  Codon optimised DNA encoding BDV P protein
atggccacaagacctagcagcctggtggacagcctggaagatgaggaagatccccagacactgcggagagagaggcctggatctcccagacctagaaaggtgcccagaaacgccctgacacagcccgttgatcagctgctgaaggacctgagaaagaaccccagcatgatcagcgaccccgaccagagaaccggaagagagcagctgtctaacgacgagctgattaagaagctggtcaccgagctggccgagaactccatgattgaggccgaagaagtgcggggcaccctgggcgatatctctgccagaatcgaggccggctttgagtctctgagcgccctgcaggttgagacaatccagacagcccagagatgcgaccacagcgacagcatcagaatcctgggcgagaacatcaagatcctggatcggagcatgaagaccatgatggaaaccatgaagctgatgatggaaaaggtggacctgctgtacgccagcacagccgtgggaacatctgctcccatgctgccttctcaccccgctcctccaagaatctaccctcagctgcctagcgctcccaccaccgatgagtgggatatcatccct

SEQ ID NO: 358 - RNA, 603 nt, Artificial Sequence
  Codon optimised RNA encoding BDV P protein
auggccacaagaccuagcagccugguggacagccuggaagaugaggaagauccccagacacugcggagagagaggccuggaucucccagaccuagaaaggugcccagaaacgcccugacacagcccguugaucagcugcugaaggaccugagaaagaaccccagcaugaucagcgaccccgaccagagaaccggaagagagcagcugucuaacgacgagcugauuaagaagcuggucaccgagcuggccgagaacuccaugauugaggccgaagaagugcggggcacccugggcgauaucucugccagaaucgaggccggcuuugagucucugagcgcccugcagguugagacaauccagacagcccagagaugcgaccacagcgacagcaucagaauccugggcgagaacaucaagauccuggaucggagcaugaagaccaugauggaaaccaugaagcugaugauggaaaagguggaccugcuguacgccagcacagccgugggaacaucugcucccaugcugccuucucaccccgcuccuccaagaaucuacccucagcugccuagcgcucccaccaccgaugagugggauaucaucccu

SEQ ID NO: 359 - protein, 98 aa, Human papillomavirus type 16
MHGDTPTLHEYMLDLQPETTDLYCYEQLNDSSEEEDEIDGPAGQAEPDRAHYNIVTFCCKCDSTLRLCVQSTHVDIRTLEDLLMGTLGIVCPICSQKP

SEQ ID NO: 360 - DNA, 294 bp, Human papillomavirus type 16
atgcatggagatacacctacattgcatgaatatatgttagatttgcaaccagagacaactgatctctactgttatgagcaattaaatgacagctcagaggaggaggatgaaatagatggtccagctggacaagcagaaccggacagagcccattacaatattgtaaccttttgttgcaagtgtgactctacgcttcggttgtgcgtacaaagcacacacgtagacattcgtactttggaagacctgttaatgggcacactaggaattgtgtgccccatctgttctcagaaacca

SEQ ID NO: 361 - DNA, 294 bp, Artificial Sequence
  Codon optimised DNA encoding HPV E7 protein
atgcacggcgatacccctacactgcacgagtacatgctggacctgcagcctgagacaaccgacctgtactgctacgagcagctgaacgacagcagcgaggaagaggacgagattgacggacctgccggacaggccgaacctgatagagcccactacaatatcgtgaccttctgctgcaagtgcgacagcaccctgagactgtgtgtgcagagcacccacgtggacatcagaaccctggaagatctgctgatgggcaccctgggcatcgtgtgccctatctgttctcagaagccc

SEQ ID NO: 362 - RNA, 294 nt, Artificial Sequence
  Codon optimised RNA encoding HPV E7 protein
augcacggcgauaccccuacacugcacgaguacaugcuggaccugcagccugagacaaccgaccuguacugcuacgagcagcugaacgacagcagcgaggaagaggacgagauugacggaccugccggacaggccgaaccugauagagcccacuacaauaucgugaccuucugcugcaagugcgacagcacccugagacugugugugcagagcacccacguggacaucagaacccuggaagaucugcugaugggcacccugggcaucgugugcccuaucuguucucagaagccc

SEQ ID NO: 363 - protein, 567 aa, Arenavirus
MSNSKEVKSFLWTQALRRELSPYCTSVKLQVIKDAQSLLHSLDFSEVSNVQRLMRKDKRDDGDLKRLRDLNQAVNNLVELKSQQQKNVLSVGQLSSDDLLVLAADIDRLKAKITRTERPQSNGVYMGNLTAQQLEQRKKLLELVGMTRPNLRAGSDGVVRVWDVKNPDLLNNQFGTMPSLTIACMTKQGQSDINDVVQALTDLGLIYTAKYPNSSDLDQLVKTHPVLGIIDTEKSAINVSGYNFSLSAAVKAGACMLDGGNMLETIKVTPQNIDPILKKTLAVKKSVGMFVSDTPGDRNPYENLLYKICLSGNGWPYIASRTSILGRAWDNTVVDLGSSNPITKPLNQQARDKVPGLQQTVGLTYSQIMCLKDIMTGMDPTSKTWIDIEGRAEDPVEIAIYQPAGGQYIHFYREPTDAKQFKQDSKYSHGIDIVDLFRVQPGLTSAVIESLPKGMVLTCQGSEDIRKLLDSQGRRDIKLIDVMMSKIDARKFENEVWDDLKTLCNMHTGVVHEKKKRGGKQEITPHCALLDCIMYEAATQGSYKTPKLTPLLPTDLVFRAGAPKVTL

SEQ ID NO: 364 - DNA, 1701 bp, Arenavirus
atgagcaactccaaggaggtgaagtcctttctttggactcaagcccttaggagggaattatcaccatactgcacaagtgtcaaacttcaagttatcaaggatgctcagagtctccttcacagcttggatttctcagaagtgagtaatgtacaacgcttgatgaggaaggacaaaagggatgacggtgacttgaagaggctgagagatttaaatcaggcagtcaacaatcttgttgaactaaaatctcaacagcagaaaaatgtcttaagtgtggggcagctgtcatctgatgaccttttagtcctcgctgctgacattgacaggctgaaagcaaagataaccaggacagagaggccccaatctaatggggtctacatggggaacctcacagctcagcaacttgaacaacgaaagaagctcctagagttggtggggatgaccagaccaaacttaagagctggttctgatggtgttgtcagggtgtgggacgtgaagaatcctgatctcttgaataaccaatttggcacaatgcccagtctaacgattgcctgcatgacaaaacaaggacaatcagacataaatgatgttgttcaggcattaactgacttggggctaatttatacagctaagtacccaaattcatcagatcttgatcaacttgtcaaaacccatccagttttgggcatcatagacacagaaaaatctgccatcaatgtttcaggttacaacttcagcctgtcagctgcagttaaggcaggtgcatgtatgctagatgggggtaacatgctcgagaccataaaggtaacacctcagaatattgatccaattctgaagaagactctggcagttaaaaagtctgttggcatgtttgtctcagacacaccaggtgacagaaacccatatgaaaacttactatacaagatctgcctctcaggcaatggatggccctacattgctagcagaacttcaattctcgggagggcctgggacaacacagttgtggacttgggcagcagtaacccaatcacaaagcccctcaatcagcaagctagagacaaagttcctggtttgcagcaaacagttggactcacatactcacaaatcatgtgtctcaaagacataatgaccggtatggacccgacaagtaagacttggattgacattgagggcagggctgaggacccagtggagattgccatctaccagccagctggtgggcaatatattcatttctacagagaaccaacagatgccaagcaatttaagcaggattctaagtactcacatggcattgacattgttgacctgtttagggtgcaaccaggccttacaagtgctgtgatagagagtctaccgaaagggatggtcttaacttgtcagggatctgaggacataagaaagctgttagatagtcaggggcgccgagacatcaagttaattgatgtgatgatgagcaagattgatgcacggaagtttgaaaatgaggtctgggatgatcttaaaacactgtgcaacatgcacactggggtggtccatgagaagaagaagagaggtggtaaacaagaaataacacctcactgtgcacttctagactgcattatgtatgaggcagccacccaggggtcatacaagacccccaaattaacacctctgctaccaactgacttggtgtttagagcaggagcacccaaagtcactctg

SEQ ID NO: 365 - DNA, 1701 bp, Artificial Sequence
  Codon optimised DNA encoding Arenavirus NP1 protein
atgagcaacagcaaagaagtcaagagcttcctctggacacaggccctgagaagagagctgagcccttactgcaccagcgtgaagctgcaagtgatcaaggacgcccagagcctgctgcacagcctggatttttccgaggtgtccaacgtgcagcggctgatgcggaaggacaagagagatgacggcgacctgaagcggctgagggatctgaatcaggccgtgaacaacctggtggaactgaagtcccagcagcagaaaaacgtgctgagcgtgggccagctgagcagcgacgatctgcttgttctggccgccgacatcgacagactgaaggccaagatcaccagaaccgagcggcctcagagcaacggcgtgtacatgggaaatctgacagcccagcagctggaacagcggaagaaactgctggaactcgtgggcatgacccggcctaatctgagagctggctctgatggcgtcgtcagagtgtgggacgtgaagaaccccgacctgctgaacaaccagttcggcaccatgcctagcctgacaatcgcctgcatgaccaagcagggccagagcgacatcaacgatgtggtgcaggcactgaccgacctgggcctgatctacaccgccaagtatcccaacagcagcgacctggatcagctggtcaagacacaccctgtgctgggcatcatcgacaccgagaagtccgccatcaacgtgtccggctacaacttctctctgtctgccgccgtgaaagccggcgcttgtatgctggatggcggcaacatgctggaaaccatcaaagtgacccctcagaacatcgaccccatcctgaagaaaaccctggccgtgaagaaaagcgtggggatgttcgtgtctgacacccctggcgacagaaacccctacgagaacctgctgtacaagatctgcctgagcggcaacggctggccctatatcgccagcagaaccagcattctgggcagagcctgggacaacaccgtggtggatctgggcagcagcaaccccatcaccaagcctctgaaccagcaggccagagataaggtgccaggcctgcagcagacagtgggcctgacatacagccagatcatgtgcctgaaggacatcatgaccggcatggaccccaccagcaagacatggatcgacatcgagggcagagctgaggaccctgtggaaatcgccatctaccaacctgccggcggacagtacatccacttctacagagagcccaccgacgccaagcagttcaagcaggacagcaagtacagccacggcatcgatatcgtggacctgttcagagtgcagcccggactgacatctgccgtgatcgagtctctgcccaaaggcatggtcctgacctgtcagggcagcgaggacatcagaaagctgctcgacagccagggcagaagagacatcaagctgatcgacgtgatgatgagcaagatcgacgcccggaagttcgagaacgaagtgtgggatgacctgaaaaccctctgcaacatgcacaccggcgtggtgcacgagaagaagaagagaggcggcaagcaagagatcacccctcactgtgctctgctggactgcattatgtacgaggccgccacacagggcagctacaagacccctaaactgacccctctgctgcctaccgatctggtgtttagagccggcgcacccaaagtgacactg

SEQ ID NO: 366 - RNA, 1701 nt, Artificial Sequence
  Codon optimised RNA encoding Arenavirus NP1 protein
augagcaacagcaaagaagucaagagcuuccucuggacacaggcccugagaagagagcugagcccuuacugcaccagcgugaagcugcaagugaucaaggacgcccagagccugcugcacagccuggauuuuuccgagguguccaacgugcagcggcugaugcggaaggacaagagagaugacggcgaccugaagcggcugagggaucugaaucaggccgugaacaaccugguggaacugaagucccagcagcagaaaaacgugcugagcgugggccagcugagcagcgacgaucugcuuguucuggccgccgacaucgacagacugaaggccaagaucaccagaaccgagcggccucagagcaacggcguguacaugggaaaucugacagcccagcagcuggaacagcggaagaaacugcuggaacucgugggcaugacccggccuaaucugagagcuggcucugauggcgucgucagagugugggacgugaagaaccccgaccugcugaacaaccaguucggcaccaugccuagccugacaaucgccugcaugaccaagcagggccagagcgacaucaacgauguggugcaggcacugaccgaccugggccugaucuacaccgccaaguaucccaacagcagcgaccuggaucagcuggucaagacacacccugugcugggcaucaucgacaccgagaaguccgccaucaacguguccggcuacaacuucucucugucugccgccgugaaagccggcgcuuguaugcuggauggcggcaacaugcuggaaaccaucaaagugaccccucagaacaucgaccccauccugaagaaaacccuggccgugaagaaaagcguggggauguucgugucugacaccccuggcgacagaaaccccuacgagaaccugcuguacaagaucugccugagcggcaacggcuggcccuauaucgccagcagaaccagcauucugggcagagccugggacaacaccgugguggaucugggcagcagcaaccccaucaccaagccucugaaccagcaggccagagauaaggugccaggccugcagcagacagugggccugacauacagccagaucaugugccugaaggacaucaugaccggcauggaccccaccagcaagacauggaucgacaucgagggcagagcugaggacccuguggaaaucgccaucuaccaaccugccggcggacaguacauccacuucuacagagagcccaccgacgccaagcaguucaagcaggacagcaaguacagccacggcaucgauaucguggaccuguucagagugcagcccggacugacaucugccgugaucgagucucugcccaaaggcaugguccugaccugucagggcagcgaggacaucagaaagcugcucgacagccagggcagaagagacaucaagcugaucgacgugaugaugagcaagaucgacgcccggaaguucgagaacgaagugugggaugaccugaaaacccucugcaacaugcacaccggcguggugcacgagaagaagaagagaggcggcaagcaagagaucaccccucacugugcucugcuggacugcauuauguacgaggccgccacacagggcagcuacaagaccccuaaacugaccccucugcugccuaccgaucugguguuuagagccggcgcacccaaagugacacug

SEQ ID NO: 367 - protein, 631 aa, Hepatitis C virus
APITAYAQQTRGLLGCIITSLTGRDKNQVEGEVQIVSTATQTFLATCINGVCWTVYHGAGTRTIASPKGPVIQTYTNVDQDLVGWPAPQGSRSLTPCTCGSSDLYLVTRHADVIPVRRRGDSRGSLLSPRPISYLKGSSGGPLLCPTGHAVGLFRAAVCTRGVAKAVDFIPVENLETTMRSPVFTDNSSPPAVPQSFQVAHLHAPTGSGKSTKVPAAYAAKGYKVLVLNPSVAATLGFGAYMSKAHGVDPNIRTGVRTITTGSPITYSTYGKFLADAGCSGGAYDIIICDECHSTDATSISGIGTVLDQAETAGARLVVLATATPPGSVTVSHPNIEEVALSTTGEIPFYGKAIPLEVIKGGRHLIFCHSKKKCDELAAKLVALGINAVAYYRGLDVSVIPTSGDVVVVSTDALMTGFTGDFDSVIDCNTCVTQTVDFSLDPTFTIETTTLPQDAVSRTQRRGRTGRGKPGIYRFVAPGERPSGMFDSSVLCECYDAGCAWYELTPAETTVRLRAYMNTPGLPVCQDHLGFWEGVFTGLTHIDAHFLSQTKQSGENFPYLVAYQATVCARAQAPPPSWDQMRKCLIRLKPTLHGPTPLLYRLGAVQNEVTLTHPITKYIMTCMSADLEVVT

SEQ ID NO: 368 - DNA, 1893 bp, Hepatitis C virus
gcgcccatcacggcgtacgcccagcagacgagaggcctcctagggtgtataatcaccagcctgactggccgggacaaaaaccaagtggagggtgaggtccagatcgtgtcaactgctacccagaccttcctggcaacgtgcatcaatggggtatgctggactgtctaccacggggccggaacgaggaccatcgcatcacccaagggtcctgtcatccagacgtataccaatgtggatcaagacctcgtgggctggcccgctcctcaaggttcccgctcattgacaccctgcacctgcggctcctcggacctttacctggtcacgaggcacgccgatgtcattcccgtgcgccggcgaggtgatagcaggggtagcctgctttcgccccggcccatttcctacttgaaaggctcctcggggggtccgctgttgtgccccacgggacacgccgtgggcctattcagggccgcggtgtgcacccgtggagtggctaaggcggtggactttatccctgtggagaacctagagacaaccatgagatccccggtgttcacggacaactcctctccaccagcagtgccccagagcttccaggtggcccacctgcatgctcccaccggcagcggtaagagcaccaaggtcccggctgcgtacgcagccaagggctacaaggtgttggtgctcaacccctctgttgctgcaacactgggctttggtgcttacatgtccaaggcccatggggttgatcctaatatcaggaccggggtgagaacaattaccactggcagccccatcacgtactccacctacggcaagttccttgccgacgccgggtgctcaggaggtgcttatgacataataatttgtgacgagtgccactccacggatgccacatccatctcgggcatcggcactgtccttgaccaagcagagactgcgggggcgagactggttgtgctcgccactgctacccctccgggctccgtcactgtgtcccatcctaacatcgaggaggttgctctgtccaccaccggagagatccccttttacggcaaggctatccccctcgaggtgatcaaggggggaagacatctcatcttctgccactcaaagaagaagtgcgacgagctcgccgcgaagctggtcgcattgggcatcaatgccgtggcctactaccgcggtcttgacgtgtctgtcatcccgaccagcggcgatgttgtcgtcgtgtcgaccgatgctctcatgactggctttaccggcgacttcgactctgtgatagactgcaacacgtgtgtcactcagacagtcgattttagccttgaccctacctttaccattgagacaaccacgctcccccaggatgctgtctccaggactcaacgccggggcaggactggcagggggaagccaggcatctatagatttgtggcaccgggggagcgcccctccggcatgttcgactcgtccgtcctctgtgagtgctatgacgcgggctgtgcttggtatgagctcacgcccgccgagactacagttaggctacgagcgtacatgaacaccccggggcttcccgtgtgccaggaccatcttggattttgggagggcgtctttacgggcctcactcatatagatgcccactttctatcccagacaaagcagagtggggagaactttccttacctggtagcgtaccaagccaccgtgtgcgctagggctcaagcccctcccccatcgtgggaccagatgcggaagtgtttgatccgccttaaacccaccctccatgggccaacacccctgctatacagactgggcgctgttcagaatgaagtcaccctgacgcacccaatcaccaaatacatcatgacatgcatgtcggccgacctggaggtcgtcacg

SEQ ID NO: 369 - DNA, 1893 bp, Artificial Sequence
  Codon optimised DNA encoding HCV NS3 protein
gcccctatcacagcctacgctcagcagacaagaggcctgctgggctgcatcatcacaagcctgaccggcagagacaagaaccaggtggaaggcgaggtgcagatcgtgtctacagctacccagaccttcctggccacctgtatcaatggcgtgtgctggaccgtgtatcacggcgctggcaccagaacaatcgcctctccaaagggccctgtgatccagacctacaccaacgtggaccaggatctcgttggctggcctgctcctcagggcagcagatctctgaccccttgtacatgcggcagcagcgacctgtacctggtcacaagacacgccgacgtgatccccgtcagaagaagaggcgatagcagaggcagcctgctgagccctagacctatcagctacctgaagggcagctctggcggacctctgctgtgtccaacaggacatgccgtgggcctgtttagagccgccgtgtgtacaagaggcgtggccaaagccgtggacttcatccccgtggaaaacctggaaaccaccatgcggagccccgtgttcaccgacaattctagccctccagccgtgcctcagagcttccaagtggctcatctgcatgcccctacaggcagcggcaagagcacaaaagtgcctgccgcctatgccgccaagggctataaggtgctggtgctgaatcccagcgtggccgccacacttggctttggcgcctatatgtctaaagcccacggcgtggaccccaacatcagaaccggcgtgcggacaatcacaacaggcagccctatcacctactctacctacggcaagttcctggccgatgccggatgttctggcggagcctacgacatcatcatctgcgacgagtgccacagcaccgacgccacatctatctctggcatcggcaccgtgctggatcaggccgaaacagctggtgctagactggtggtgctggccacagctacacctccaggctctgtgacagtgtctcaccccaatatcgaggaagtggccctgtctacaaccggcgagatcccattctatggcaaggccattcctctggaagtgatcaaaggcggcagacacctgatcttttgccactccaagaagaagtgcgacgagctggccgccaaactggtggcccttggaatcaatgccgtggcctactacagaggactggacgtgtccgtgattcccacatctggcgacgtggtggtggtgtccactgatgccctgatgaccggcttcaccggcgacttcgatagcgtgatcgactgcaatacctgcgtgacccagaccgtggatttctctctggaccccaccttcaccatcgagacaaccacactgcctcaggacgccgtgtctcggacacagagaagaggcagaaccggaagaggcaagcccggcatctacagatttgtggcccctggcgaaagacccagcggcatgtttgatagcagcgtgctgtgcgagtgctacgatgctggctgtgcttggtacgagctgacccctgccgagactaccgttagactgcgggcctacatgaacacccctggcctgcctgtgtgtcaggaccacctcggattttgggagggcgtgttcacaggactgacccacatcgacgcccactttctgagccagacaaagcagagcggcgagaacttcccttacctggtggcttaccaggccaccgtgtgtgctagagcacaagcccctccacctagctgggaccagatgaggaagtgcctgatccggctgaagcctacactgcacggaccaacaccactgctgtatagactgggcgccgtgcagaacgaagtgaccctgacacatcccatcaccaagtacatcatgacctgcatgagcgccgacctggaagtggtcaca

SEQ ID NO: 370 - RNA, 1893 nt, Artificial Sequence
  Codon optimised RNA encoding HCV NS3 protein
gccccuaucacagccuacgcucagcagacaagaggccugcugggcugcaucaucacaagccugaccggcagagacaagaaccagguggaaggcgaggugcagaucgugucuacagcuacccagaccuuccuggccaccuguaucaauggcgugugcuggaccguguaucacggcgcuggcaccagaacaaucgccucuccaaagggcccugugauccagaccuacaccaacguggaccaggaucucguuggcuggccugcuccucagggcagcagaucucugaccccuuguacaugcggcagcagcgaccuguaccuggucacaagacacgccgacgugauccccgucagaagaagaggcgauagcagaggcagccugcugagcccuagaccuaucagcuaccugaagggcagcucuggcggaccucugcuguguccaacaggacaugccgugggccuguuuagagccgccguguguacaagaggcguggccaaagccguggacuucauccccguggaaaaccuggaaaccaccaugcggagccccguguucaccgacaauucuagcccuccagccgugccucagagcuuccaaguggcucaucugcaugccccuacaggcagcggcaagagcacaaaagugccugccgccuaugccgccaagggcuauaaggugcuggugcugaaucccagcguggccgccacacuuggcuuuggcgccuauaugucuaaagcccacggcguggaccccaacaucagaaccggcgugcggacaaucacaacaggcagcccuaucaccuacucuaccuacggcaaguuccuggccgaugccggauguucuggcggagccuacgacaucaucaucugcgacgagugccacagcaccgacgccacaucuaucucuggcaucggcaccgugcuggaucaggccgaaacagcuggugcuagacugguggugcuggccacagcuacaccuccaggcucugugacagugucucaccccaauaucgaggaaguggcccugucuacaaccggcgagaucccauucuauggcaaggccauuccucuggaagugaucaaaggcggcagacaccugaucuuuugccacuccaagaagaagugcgacgagcuggccgccaaacugguggcccuuggaaucaaugccguggccuacuacagaggacuggacguguccgugauucccacaucuggcgacgugguggugguguccacugaugcccugaugaccggcuucaccggcgacuucgauagcgugaucgacugcaauaccugcgugacccagaccguggauuucucucuggaccccaccuucaccaucgagacaaccacacugccucaggacgccgugucucggacacagagaagaggcagaaccggaagaggcaagcccggcaucuacagauuuguggccccuggcgaaagacccagcggcauguuugauagcagcgugcugugcgagugcuacgaugcuggcugugcuugguacgagcugaccccugccgagacuaccguuagacugcgggccuacaugaacaccccuggccugccugugugucaggaccaccucggauuuugggagggcguguucacaggacugacccacaucgacgcccacuuucugagccagacaaagcagagcggcgagaacuucccuuaccugguggcuuaccaggccaccgugugugcuagagcacaagccccuccaccuagcugggaccagaugaggaagugccugauccggcugaagccuacacugcacggaccaacaccacugcuguauagacugggcgccgugcagaacgaagugacccugacacaucccaucaccaaguacaucaugaccugcaugagcgccgaccuggaaguggucaca

SEQ ID NO: 371 - protein, 127 aa, Dengue virus type 1
SVSGDLILEIGKLPQHLTQRAQNALDNLVMLHNSEQGGKAYRHAMEELPDTIETLMLLALIAVLTGGVTLFFLSGRGLGKTSIGLLCVIASSALLWMASVEPHWIAASIILEFFLMVLLIPEPDRQR

SEQ ID NO: 372 - DNA, 381 bp, Dengue virus type 1
agcgtctcaggtgacctaatattagaaatagggaaacttccacaacatttaacgcaaagggcccagaacgccttggacaatctggttatgttgcacaactctgaacaaggaggaaaagcctatagacacgccatggaagaactaccagacaccatagaaacgttaatgctcctagctttgatagctgtgctgactggtggagtgacgttgttcttcctatcaggaaggggtctaggaaaaacatccattggcctactctgcgtgattgcctcaagcgcactgctatggatggccagtgtggaaccccattggatagcggcctctatcatactggagttctttctgatggtgttgcttattccagagccggacagacagcgc

SEQ ID NO: 373 - DNA, 381 bp, Artificial Sequence
  Codon optimised DNA encoding DENV 1 NS4A
tccgttagcggcgacctgatcctggaaatcggcaagctgcctcagcacctgacacagagagcacagaacgccctggacaacctggtcatgctgcacaactctgagcaaggcggcaaggcctacagacacgccatggaagaactgcccgacaccatcgagacactgatgctgctggccctgatcgctgttctgacaggcggagtgaccctgttcttcctgtctggcagaggcctgggcaagacctctatcggactgctgtgtgtgatcgccagctctgccctgctgtggatggcttctgtggaacctcattggatcgccgcctctattatcctggaattcttcctgatggtgctgctgatccccgagcctgacagacagaga

SEQ ID NO: 374 - RNA, 381 nt, Artificial Sequence
  Codon optimised RNA encoding DENV 1 NS4A
uccguuagcggcgaccugauccuggaaaucggcaagcugccucagcaccugacacagagagcacagaacgcccuggacaaccuggucaugcugcacaacucugagcaaggcggcaaggccuacagacacgccauggaagaacugcccgacaccaucgagacacugaugcugcuggcccugaucgcuguucugacaggcggagugacccuguucuuccugucuggcagaggccugggcaagaccucuaucggacugcugugugugaucgccagcucugcccugcuguggauggcuucuguggaaccucauuggaucgccgccucuauuauccuggaauucuuccugauggugcugcugauccccgagccugacagacagaga

SEQ ID NO: 375 - protein, 218 aa, Dengue virus type 1
GSGEVDSFSLGLLCISIMIEEVMRSRWSRKMLMTGTLAVFLLLTMGQLTWNDLIRLCIMVGANASDKMGMGTTYLALMATFRMRPMFAVGLLFRRLTSREVLLLTVGLSLVASVELPNSLEELGDGLAMGIMMLKLLTDFQSHQLWATLLSLTFVKTTFSLHYAWKTMAMILSIVSLFPLCLSTTSQKTTWLPVLLGSLGCKPLTMFLITENKIWGRK

SEQ ID NO: 376 - DNA, 654 bp, Dengue virus type 1
gggtcaggagaagtggacagtttttcactaggactgctatgcatatcaataatgatcgaagaggtaatgagatccagatggagcagaaaaatgctgatgactggaacattggctgtgttcctccttctcacaatgggacaattgacatggaatgatctgatcaggctatgtatcatggttggagccaacgcttcagacaagatggggatgggaacaacgtacctagctttgatggccactttcagaatgagaccaatgttcgcagtcgggctactgtttcgcagattaacatctagagaagttcttcttcttacagttggattgagtctggtggcatctgtagaactaccaaattccttagaggagctaggggatggacttgcaatgggcatcatgatgttgaaattactgactgattttcagtcacatcagctatgggctaccttgctgtctttaacatttgtcaaaacaactttttcattgcactatgcatggaagacaatggctatgatactgtcaattgtatctctcttccctttatgcctgtccacgacttctcaaaaaacaacatggcttccggtgttgctgggatctcttggatgcaaaccactaaccatgtttcttataacagaaaacaaaatctggggaaggaaa

SEQ ID NO: 377 - DNA, 654 bp, Artificial Sequence
  Codon optimised DNA encoding DENV 1 NS2A
ggatctggcgaggtggactctttttctctgggcctgctgtgcatcagcatcatgatcgaggaagtgatgcggagccgctggtcccggaaaatgctgatgactggaaccctggccgtgttcctgctgctgacaatgggacagctgacctggaacgacctgatccggctgtgtatcatggtcggagccaacgccagcgacaagatgggcatgggcacaacctatctggccctgatggccaccttccggatgaggcctatgtttgccgtgggactgctgttcagaaggctgacctctagagaggtgctgctgctcacagtgggcctgtctctggtggcttctgtggaactgcccaacagcctggaagaactcggagatggactggccatgggcattatgatgctcaagctgctgaccgacttccagagccaccagctgtgggctacactgctgagcctgaccttcgtgaaaaccaccttcagcctgcactacgcctggaaaacaatggccatgatcctgagcatcgtgtctctgttccctctgtgcctgagcaccaccagccagaaaaccacatggctgcctgtgctgctgggctctctgggctgtaaacccctgaccatgttcctgatcaccgagaacaagatctggggcagaaag

SEQ ID NO: 378 - RNA, 654 nt, Artificial Sequence
  Codon optimised RNA encoding DENV 1 NS2A
ggaucuggcgagguggacucuuuuucucugggccugcugugcaucagcaucaugaucgaggaagugaugcggagccgcuggucccggaaaaugcugaugacuggaacccuggccguguuccugcugcugacaaugggacagcugaccuggaacgaccugauccggcuguguaucauggucggagccaacgccagcgacaagaugggcaugggcacaaccuaucuggcccugauggccaccuuccggaugaggccuauguuugccgugggacugcuguucagaaggcugaccucuagagaggugcugcugcucacagugggccugucucugguggcuucuguggaacugcccaacagccuggaagaacucggagauggacuggccaugggcauuaugaugcucaagcugcugaccgacuuccagagccaccagcugugggcuacacugcugagccugaccuucgugaaaaccaccuucagccugcacuacgccuggaaaacaauggccaugauccugagcaucgugucucuguucccucugugccugagcaccaccagccagaaaaccacauggcugccugugcugcugggcucucugggcuguaaaccccugaccauguuccugaucaccgagaacaagaucuggggcagaaag

SEQ ID NO: 379 - protein, 218 aa, Dengue virus type 2
GHGQVDNFSLGVLGMALFLEEMLRTRVGTKHAILLVAVSFVTLIIGNMSFRDLGRVMVMVGATMTDDIGMGVTYLALLAAFKVRPTFAAGLLLRKLTSKALMMTTIGIVLSSQSTTPETILELTDALALGMMVLKMVRNMEKYQLAVTIMAILCVPNAVILQNAWKVSCTILAVVSVSPLFLTSSQQKTDWIPLALTIKGLNPTAIFLTTLSRTSKKR

SEQ ID NO: 380 - DNA, 654 bp, Dengue virus type 2
ggacatgggcaggtcgacaacttttcactaggagtcttgggaatggcattgttcctggaggaaatgcttaggacccgagtaggaacgaaacatgcaatactactagttgcagtttcttttgtgacattgatcatagggaacatgtcctttagagacctgggaagagtaatggttatggtaggcgccactatgacggatgacataggtatgggcgtgacttatcttgccctactagcagccttcaaagtcagaccaacttttgcagctggactactcttgagaaagctgacctccaaggcattgatgatgactactataggaattgtactctcctcccagagcactacaccagagaccattcttgagttgactgatgcgttagccttaggcatgatggtcctcaaaatggtgagaaatatggaaaagtatcaattggcagtgactatcatggctatcttgtgcgtcccaaacgcagtgatattacaaaacgcatggaaagtgagttgcacgatattggcagtggtgtccgtttccccactgttcttaacatcctcacagcaaaaaacggattggataccattagcgttgacgatcaaaggtctcaatccaacagctatttttctaacaaccctctcaagaaccagcaagaaaagg

SEQ ID NO: 381 - DNA, 654 bp, Artificial Sequence
  Codon optimised DNA encoding DENV 2 NS2A protein
ggacacggacaggtggacaatttttccctgggcgtgctcggcatggccctgtttctggaagagatgctgagaaccagagtgggcaccaagcacgccattctgctggtggccgtgtccttcgtgacactgatcatcggcaacatgagcttccgcgacctgggcagagtgatggtcatggtcggagccaccatgaccgacgatatcggcatgggcgtgacctatctggctctgctggccgcttttaaagtgcggcctacatttgccgccggactgctgctgagaaagctgacatctaaggccctgatgatgaccaccatcggcatcgtgctgagcagccagagcaccacacctgagacaatcctggaactgaccgacgctctggccctgggaatgatggtgctgaagatggtccgaaacatggaaaagtaccagctggccgtgaccatcatggccatcctgtgtgtgcccaacgccgtgatcctgcagaacgcctggaaggtgtcctgtaccatcctggccgtggtgtctgtgtcccctctgtttctgaccagcagccagcagaaaaccgactggatcccactggctctgaccatcaagggcctgaatcctaccgccatcttcctgaccacactgagccggaccagcaagaagaga

SEQ ID NO: 382 - RNA, 654 nt, Artificial Sequence
  Codon optimised RNA encoding DENV 2 NS2A
ggacacggacagguggacaauuuuucccugggcgugcucggcauggcccuguuucuggaagagaugcugagaaccagagugggcaccaagcacgccauucugcugguggccguguccuucgugacacugaucaucggcaacaugagcuuccgcgaccugggcagagugauggucauggucggagccaccaugaccgacgauaucggcaugggcgugaccuaucuggcucugcuggccgcuuuuaaagugcggccuacauuugccgccggacugcugcugagaaagcugacaucuaaggcccugaugaugaccaccaucggcaucgugcugagcagccagagcaccacaccugagacaauccuggaacugaccgacgcucuggcccugggaaugauggugcugaagaugguccgaaacauggaaaaguaccagcuggccgugaccaucauggccauccugugugugcccaacgccgugauccugcagaacgccuggaagguguccuguaccauccuggccguggugucuguguccccucuguuucugaccagcagccagcagaaaaccgacuggaucccacuggcucugaccaucaagggccugaauccuaccgccaucuuccugaccacacugagccggaccagcaagaagaga

SEQ ID NO: 383 - protein, 218 aa, Dengue virus type 4
GQGTSETFSMGLLCLTLFVEECLRRRVTRKHMILVVVITLCAIILGGLTWMDLLRALIMLGDTMSGRIGGQIHLAIMAVFKMSPGYVLGVFLRKLTSRETALMVIGMAMTTVLSIPHDLMELIDGISLGLILLKIVTQFDNTQVGTLALSLTFIRSTMPLVMAWRTIMAVLFVVTLIPLCRTSCLQKQSHWVEITALILGAQALPVYLMTLMKGASRR

SEQ ID NO: 384 - DNA, 654 bp, Dengue virus type 4
ggacagggcacatcagaaactttttctatgggtctgttgtgcctgaccttgtttgtggaagaatgcttgaggagaagagtcactaggaaacacatgatattagttgtggtgatcactctttgtgctatcatcctgggaggcctcacatggatggacttactacgagccctcatcatgttgggggacactatgtctggtagaataggaggacagatccacctagccatcatggcagtgttcaagatgtcaccaggatacgtgctgggtgtgtttttaaggaaactcacttcaagagagacagcactaatggtaataggaatggccatgacaacggtgctttcaattccacatgaccttatggaactcattgatggaatatcactgggactaattttgctaaaaatagtaacacagtttgacaacacccaagtgggaaccttagctctttccttgactttcataagatcaacaatgccattggtcatggcttggaggaccattatggctgtgttgtttgtggtcacactcattcctttgtgcaggacaagctgtcttcaaaaacagtctcattgggtagaaataacagcactcatcctaggagcccaagctctgccagtgtacctaatgactcttatgaaaggagcctcaagaaga

SEQ ID NO: 385 - DNA, 654 bp, Artificial Sequence
  Codon optimised DNA encoding DENV 4 NS2A
ggccagggaacaagcgagacattttccatgggcctgctgtgtctgaccctgttcgtggaagagtgcctgcggagaagagtgacccggaagcacatgatcctggtggtggtcatcaccctgtgcgccatcattctcggcggcctgacatggatggatctgctgagagccctgatcatgctgggcgataccatgagcggcagaatcggcggacagatccacctggccatcatggccgtgttcaagatgagccctggctacgtgctgggcgtgttcctgagaaagctgaccagcagagaaacagccctgatggtcatcggaatggccatgaccaccgtgctgagcatccctcacgacctgatggaactgatcgacggcatcagcctgggcctgatcctgctgaagatcgtgacccagttcgacaacacccaagtgggcacactggccctgagcctgaccttcatcagatccacaatgcccctcgtgatggcctggcggacaattatggccgtgctgttcgtcgtgacactgatccctctgtgcagaaccagctgcctgcagaaacagagccactgggtcgagatcaccgctctgattctgggagcacaggccctgcctgtgtacctgatgacacttatgaagggcgccagcagacgg

SEQ ID NO: 386 - RNA, 654 nt, Artificial Sequence
  Codon optimised RNA encoding DENV 4 NS2A protein
ggccagggaacaagcgagacauuuuccaugggccugcugugucugacccuguucguggaagagugccugcggagaagagugacccggaagcacaugauccuggugguggucaucacccugugcgccaucauucucggcggccugacauggauggaucugcugagagcccugaucaugcugggcgauaccaugagcggcagaaucggcggacagauccaccuggccaucauggccguguucaagaugagcccuggcuacgugcugggcguguuccugagaaagcugaccagcagagaaacagcccugauggucaucggaauggccaugaccaccgugcugagcaucccucacgaccugauggaacugaucgacggcaucagccugggccugauccugcugaagaucgugacccaguucgacaacacccaagugggcacacuggcccugagccugaccuucaucagauccacaaugccccucgugauggccuggcggacaauuauggccgugcuguucgucgugacacugaucccucugugcagaaccagcugccugcagaaacagagccacugggucgagaucaccgcucugauucugggagcacaggcccugccuguguaccugaugacacuuaugaagggcgccagcagacgg

SEQ ID NO: 387 - protein, 130 aa, Dengue virus type 1
SWPLNEGIMAVGIVSILLSSLLKNDVPLAGPLIAGGMLIACYVISGSSADLSLEKAAEVSWEEEAEHSGASHNILVEVQDDGTMKIKDEERDDTLTILLKATLLAISGVYPMSIPATLFVWYFWQKKKQR

SEQ ID NO: 388 - DNA, 390 bp, Dengue virus type 1
agctggcctctcaatgaaggaattatggctgttggaatagttagcattcttctaagttcacttctcaagaatgatgtgccactagctggcccactaatagctggaggcatgctaatagcatgttatgtcatatctggaagctcggccgatttatcactggagaaagcggctgaggtctcctgggaagaagaagcagaacactctggtgcctcacacaacatactagtggaggtccaagatgatggaaccatgaagataaaggatgaagagagagatgacacactcaccattctcctcaaagcaactctgctagcaatctcaggggtatacccaatgtcaataccggcgaccctctttgtgtggtatttttggcagaaaaagaaacagaga

SEQ ID NO: 389 - DNA, 390 bp, Artificial Sequence
  Codon optimised DNA encoding DENV 1 NS2B protein
agctggcctctgaacgagggaattatggccgtgggcatcgtgtccatcctgctgtctagcctgctgaagaacgacgtgccactggccggacctcttattgctggcggaatgctgatcgcctgctacgtgatcagcggcagctctgccgatctgagcctggaaaaagccgccgaggtgtcctgggaagaagaggccgaacattctggcgcctctcacaacatcctggtggaagtgcaggacgacggcaccatgaagatcaaggacgaggaacgggacgacaccctgaccattctgctgaaggctaccctgctggccatcagcggagtgtaccctatgagcatccccgccactctgttcgtgtggtacttctggcagaagaagaagcagcgg

SEQ ID NO: 390 - RNA, 390 nt, Artificial Sequence
  Codon optimised RNA encoding DENV 1 NS2B protein
agcuggccucugaacgagggaauuauggccgugggcaucguguccauccugcugucuagccugcugaagaacgacgugccacuggccggaccucuuauugcuggcggaaugcugaucgccugcuacgugaucagcggcagcucugccgaucugagccuggaaaaagccgccgagguguccugggaagaagaggccgaacauucuggcgccucucacaacauccugguggaagugcaggacgacggcaccaugaagaucaaggacgaggaacgggacgacacccugaccauucugcugaaggcuacccugcuggccaucagcggaguguacccuaugagcauccccgccacucuguucgugugguacuucuggcagaagaagaagcagcgg

SEQ ID NO: 391 - protein, 130 aa, Dengue virus type 2
SWPLNEAIMAVGMVSILASSLLKNDIPMTGPLVAGGPLTVCYVLTGRSADLELERAADVKWEDQAEISGSSPILSITISEDGSMSIKNEEEEQTLTILIRTGLLVISGLFPVSIPITAAAWYLWEVKKQR

SEQ ID NO: 392 - DNA, 390 bp, Dengue virus type 2
agctggccattaaatgaggctatcatggcagtcgggatggtgagcattttagccagttctctcctaaaaaatgatattcccatgacaggaccattagtggctggagggcccctcactgtgtgctacgtgctcactggacgatcggccgatttggaactggagagagcagccgatgtcaaatgggaagaccaggcagagatatcaggaagcagcccaatcctgtcaataacaatatcagaagatggtagcatgtcgataaaaaatgaagaggaagaacaaacactgaccatactcattagaacaggattgctggtgatctcaggactttttcctgtatcaataccaatcacggcagcagcatggtacctgtgggaagtgaagaaacaacgg

SEQ ID NO: 393 - DNA, 390 bp, Artificial Sequence
  Codon optimised DNA encoding DENV 2 NS2B protein
agctggcctctgaacgaggccattatggccgtcggcatggtgtctatcctggccagcagcctgctgaagaacgacatccctatgacaggccctctggtggctggtggacctctgacagtgtgttacgtgctgacaggcagaagcgccgacctggaacttgaaagggccgctgatgtgaagtgggaagatcaggccgagatcagcggcagcagccctatcctgagcatcaccatcagcgaggacggcagcatgagcatcaagaacgaggaagaggaacagaccctgaccatcctgatcagaaccggcctgctggtcatcagcggactgttccctgtgtcaatccccatcacagccgccgcttggtatctgtgggaagtgaagaagcagcgg

SEQ ID NO: 394 - RNA, 390 nt, Artificial Sequence
  Codon optimised RNA encoding DENV 2 NS2B protein
agcuggccucugaacgaggccauuauggccgucggcauggugucuauccuggccagcagccugcugaagaacgacaucccuaugacaggcccucugguggcugguggaccucugacaguguguuacgugcugacaggcagaagcgccgaccuggaacuugaaagggccgcugaugugaagugggaagaucaggccgagaucagcggcagcagcccuauccugagcaucaccaucagcgaggacggcagcaugagcaucaagaacgaggaagaggaacagacccugaccauccugaucagaaccggccugcuggucaucagcggacuguucccugugucaauccccaucacagccgccgcuugguaucugugggaagugaagaagcagcgg

SEQ ID NO: 395 - protein, 130 aa, Dengue virus type 4
SWPLNEGIMAVGLVSLLGSALLKNDVPLAGPMVAGGLLLAAYVMSGSSADLSLEKAANVQWDEMADITGSSPIIEVKQDEDGSFSIRDVEETNMITLLVKLALITVSGLYPLAIPVTMTLWYMWQVKTQR

SEQ ID NO: 396 - DNA, 390 bp, Dengue virus type 4
tcttggcctcttaacgagggcataatggctgtgggtttggttagtctcttaggaagcgctcttttaaagaatgatgtccctttagctggcccaatggtggcaggaggcttacttctggcggcttacgtgatgagtggtagctcagcagatctgtcactagagaaggccgccaacgtgcagtgggatgaaatggcagacataacaggctcaagcccaatcatagaagtgaagcaggatgaagatggctctttctccatacgggacgtcgaggaaaccaatatgataacccttttggtgaaactggcactgataacagtgtcaggtctctaccccttggcaattccagtcacaatgaccttatggtacatgtggcaagtgaaaacacaaaga

SEQ ID NO: 397 - DNA, 390 bp, Artificial Sequence
  Codon optimised DNA encoding DENV 4 NS2B protein
agctggcctctgaacgagggaatcatggccgttggcctggtgtctctgctgggatctgccctgctgaagaacgatgtgcctctggccggacctatggttgctggtggactgctgctggccgcctatgtgatgtctggaagcagcgccgatctgagcctggaaaaggccgctaacgtgcagtgggacgagatggccgatatcacaggcagcagccccatcatcgaagtgaagcaggatgaggacggcagcttcagcatccgcgacgtggaagagacaaacatgatcaccctgctggtcaagctggccctgatcaccgtgtctggcctgtatcctctggctatccccgtgaccatgacactgtggtacatgtggcaagtgaaaacccagcgg

SEQ ID NO: 398 - RNA, 390 nt, Artificial Sequence
  Codon optimised RNA encoding DENV 4 NS2B protein
agcuggccucugaacgagggaaucauggccguuggccuggugucucugcugggaucugcccugcugaagaacgaugugccucuggccggaccuaugguugcugguggacugcugcuggccgccuaugugaugucuggaagcagcgccgaucugagccuggaaaaggccgcuaacgugcagugggacgagauggccgauaucacaggcagcagccccaucaucgaagugaagcaggaugaggacggcagcuucagcauccgcgacguggaagagacaaacaugaucacccugcuggucaagcuggcccugaucaccgugucuggccuguauccucuggcuauccccgugaccaugacacugugguacauguggcaagugaaaacccagcgg

SEQ ID NO: 399 - protein, 126 aa, West Nile virus
SQIGLVEVLGRMPEHFMVKTWEALDTMYVVATAEKGGRAHRMALEELPDALQTIVLIALLSVMSLGVFFLLMQRKGIGKIGLGGVILGAATFFCWMAEVPGTKIAGMLLLSLLLMIVLIPEPEKQR

SEQ ID NO: 400 - DNA, 378 bp, West Nile virus
tcacaaatcgggctcgttgaggtgctcgggagaatgcctgaacacttcatggtgaaaacttgggaggcattggacacgatgtatgtggtggcgaccgctgaaaaaggaggccgagctcacaggatggctcttgaggagctaccggacgcccttcagacaatagttttgattgcactattgagtgtgatgtccttaggtgtgttttttctactcatgcaaaggaagggcattggtaagattggcttgggaggagtaatcttaggagctgccacattcttctgctggatggctgaagtcccaggaacgaaaatagcaggcatgctcctgctttccctgctgctcatgattgttttgattccggagccggaaaagcagcgc

SEQ ID NO: 401 - DNA, 378 bp, Artificial Sequence
  Codon optimised DNA encoding WNV NS4A protein
tctcagatcggcctggtggaagtgctgggcagaatgcctgagcacttcatggtcaagacctgggaagccctggacactatgtacgtggtggccacagccgagaaaggcggcagagcacatagaatggccctggaagaactgcccgacgctctgcagacaatcgtgctgattgccctgctgagcgtgatgagcctgggcgtgttcttcctgctgatgcagagaaaaggcatcggcaagatcggactcggcggcgttatactgggagccgccaccttcttttgctggatggctgaagtgcccggcaccaagattgccggaatgctgctgctgtccctgctgctgatgattgtgctgatccccgagcctgagaagcagaga

SEQ ID NO: 402 - RNA, 378 nt, Artificial Sequence
  Codon optimised RNA encoding WNV NS4A protein
ucucagaucggccugguggaagugcugggcagaaugccugagcacuucauggucaagaccugggaagcccuggacacuauguacgugguggccacagccgagaaaggcggcagagcacauagaauggcccuggaagaacugcccgacgcucugcagacaaucgugcugauugcccugcugagcgugaugagccugggcguguucuuccugcugaugcagagaaaaggcaucggcaagaucggacucggcggcguuauacugggagccgccaccuucuuuugcuggauggcugaagugcccggcaccaagauugccggaaugcugcugcugucccugcugcugaugauugugcugauccccgagccugagaagcagaga

SEQ ID NO: 403 - protein, 256 aa, West Nile virus
NEMGWLDKTKNDIGSLLGHRPEARETTLGVESFLLDLRPATAWSLYAVTTAVLTPLLKHLITSDYINTSLTSINVQASALFTLARGFPFVDVGVSALLLAVGCWGQVTLTVTVTAAALLFCHYAYMVPGWQAEAMRSAQRRTAAGIMKNVVVDGIVATDVPELERTTPVMQKKVGQIILILVSMAAVVVNPSVRTVREAGILTTAAAVTLWENGASSVWNATTAIGLCHIMRGGWLSCLSIMWTLIKNMEKPGLKR

SEQ ID NO: 404 - DNA, 768 bp, West Nile virus
aatgaaatgggctggctggacaagaccaagaatgacattggcagcctgttggggcacaggccagaagctagagagacgaccctgggagttgagagcttcttacttgatctgcggccggccacggcatggtcgctctatgccgtaacgacagccgttctcacccctttgctgaagcatctaatcacgtcagactacatcaacacttcgttgacctcaataaacgtccaagccagcgcgttgttcactttggccagaggcttcccttttgtggacgttggtgtgtcagctctcttgctggcggtcgggtgctggggtcaggtgactctgactgtgactgtgactgcagctgctctgctcttttgccactatgcttacatggtgccaggctggcaagcggaagccatgcgatctgcccagcggcggacagctgctggcatcatgaaaaatgtagtggtggatgggatcgtggccactgatgtacctgaacttgaacgaacaactccagtcatgcagaaaaaagttggacagatcatattgatcttggtatcaatggccgcggtggtcgtcaatccatcagtgagaaccgtcagagaggccggaattctgactacagcagcagcagtcaccctatgggagaatggtgctagttcagtgtggaatgcaacgacagctattggcctttgtcacatcatgcgaggaggatggctctcgtgtctctccatcatgtggactctcatcaaaaacatggagaaaccaggcctcaagagg

SEQ ID NO: 405 - DNA, 768 bp, Artificial Sequence
  Codon optimised DNA encoding WNV NS4B protein
aacgagatgggctggctggacaagaccaagaacgacatcggaagcctgctgggccacagacctgaggccagagaaacaaccctgggcgtcgagagcttcctgctggatcttagacctgccaccgcttggagcctgtacgccgttacaacagccgtgctgacccctctgctgaagcacctgatcaccagcgactacatcaacaccagcctgaccagcatcaacgtgcaggccagcgctctgtttaccctggccagaggcttcccctttgtggacgtgggagtttctgctctgctgctggccgttggctgttggggacaagtgaccctgaccgtgacagtgactgctgccgctctgctgttctgccactacgcctatatggtgcctggatggcaggccgaggccatgagatctgcccagagaagaacagccgccggaatcatgaagaacgtggtggtggatggcatcgtggccaccgacgttccagagctggaaagaaccacacctgtgatgcagaagaaagtcggccagatcatcctgatcctggtgtccatggccgccgtggtggtcaatcctagcgtgcggacagttagagaggccggcatcctgacaacagctgccgctgttaccctgtgggagaatggcgctagcagcgtgtggaatgccaccacagccatcggcctgtgccacatcatgagaggcggctggctgagctgcctgagcatcatgtggaccctgatcaagaacatggaaaagcccggcctgaagcgg

SEQ ID NO: 406 - RNA, 768 nt, Artificial Sequence
  Codon optimised RNA encoding WNV NS4B protein
aacgagaugggcuggcuggacaagaccaagaacgacaucggaagccugcugggccacagaccugaggccagagaaacaacccugggcgucgagagcuuccugcuggaucuuagaccugccaccgcuuggagccuguacgccguuacaacagccgugcugaccccucugcugaagcaccugaucaccagcgacuacaucaacaccagccugaccagcaucaacgugcaggccagcgcucuguuuacccuggccagaggcuuccccuuuguggacgugggaguuucugcucugcugcuggccguuggcuguuggggacaagugacccugaccgugacagugacugcugccgcucugcuguucugccacuacgccuauauggugccuggauggcaggccgaggccaugagaucugcccagagaagaacagccgccggaaucaugaagaacguggugguggauggcaucguggccaccgacguuccagagcuggaaagaaccacaccugugaugcagaagaaagucggccagaucauccugauccugguguccauggccgccgugguggucaauccuagcgugcggacaguuagagaggccggcauccugacaacagcugccgcuguuacccugugggagaauggcgcuagcagcguguggaaugccaccacagccaucggccugugccacaucaugagaggcggcuggcugagcugccugagcaucauguggacccugaucaagaacauggaaaagcccggccugaagcgg

SEQ ID NO: 407 - protein, 297 aa, Rabies virus
MSKIFVNPSAIRAGLADLEMAEETVDLINRNIEDNQAHLQGEPIEVDNLPEDMGRLHLDDGKSPNPGEMAKVGEGKYREDFQMDEGEDPSFLFQSYLENVGVQIVRQMRSGERFLKIWSQTVEEIISYVAVNFPNPPGKSSEDKSTQTTGRELKKETTPTPSQRESQSSKARMAAQTASGPPALEWSATNEKDDLSVEAEIAHQIAESFSKKYKFPSRSSGILLYNFEQLKMNLDDIVKEAKNVPGVTRLAHDGSKLPLRCVLGWVALANSKKFQLLVESDKLSKIMQDDLNRYTSC

SEQ ID NO: 408 - DNA, 891 bp, Rabies virus
atgagcaagatctttgtcaatcctagtgctattagagccggtctggccgatcttgagatggctgaagaaactgttgatctgatcaatagaaatatcgaagacaatcaggctcatctccaaggggaacccatagaagtggacaatctccctgaggatatggggcgacttcacctggatgatggaaaatcgcccaaccctggtgagatggccaaggtgggagaaggcaagtatcgagaggactttcagatggatgaaggagaggatcctagcttcctgttccagtcatacctggaaaatgttggagtccaaatagtcagacaaatgaggtcaggagagagatttctcaagatatggtcacagaccgtagaagagattatatcctatgtcgcggtcaactttcccaaccctccaggaaagtcttcagaggataaatcaacccagactactggccgagagctcaagaaggagacaacacccactccttctcagagagaaagccaatcatcgaaagccaggatggcggctcaaactgcttctggccctccagcccttgaatggtcggccaccaatgaaaaggatgatctatcagtggaggctgagatcgctcaccagattgcagaaagtttctccaaaaaatataagtttccctctcgatcctcagggatactcttgtataattttgagcaattgaaaatgaaccttgatgatatagttaaagaggcaaaaaatgtaccaggtgtgacccgtttagcccatgacgggtccaaactccccctaagatgtgtactgggatgggtcgctttggccaactctaagaaattccagttgttagtcgaatccgacaagctgagtaaaatcatgcaagatgacttgaatcgctatacatcttgc

SEQ ID NO: 409 - DNA, 891 bp, Artificial Sequence
  Codon optimised DNA encoding Rabies virus PP protein
atgagcaagatcttcgtgaaccccagcgccatcagagccggactggctgatctggaaatggccgaggaaaccgtggacctgatcaaccggaacatcgaggacaatcaggcccatctgcagggcgagcctatcgaggttgacaacctgcctgaggacatgggcagactgcacctggatgatggcaagagccctaatcctggcgagatggccaaagtcggcgagggcaagtaccgcgaggacttccaaatggacgagggcgaagatcccagcttcctgttccagtcctacctggaaaacgtgggcgtgcagatcgtgcggcagatgagaagcggcgagcggttcctgaagatctggtcccagaccgtggaagagatcatcagctacgtggccgtgaacttccccaatcctccaggcaagagcagcgaggacaagagcacacagaccaccggcagagagctgaagaaagagacaacccctacacctagccagagagagagccagagcagcaaggccagaatggccgctcagacagcttctggacctcctgcacttgagtggagcgccaccaacgagaaggacgacctgtctgtggaagccgagatcgcccaccagatcgccgagagcttcagcaagaagtacaagttccccagcagaagcagcggcatcctgctgtacaacttcgagcagctgaagatgaacctggacgacatcgtgaaagaggccaagaacgtccccggcgtgacaagactggcccacgatggatctaagctgcccctgagatgtgtgctcggatgggttgccctggccaacagcaagaaattccagctgctggtggaaagcgacaagctgtccaagatcatgcaggacgatctgaaccggtacaccagctgc

SEQ ID NO: 410 - RNA, 891 nt, Artificial Sequence
  Codon optimised RNA encoding Rabies virus PP protein
augagcaagaucuucgugaaccccagcgccaucagagccggacuggcugaucuggaaauggccgaggaaaccguggaccugaucaaccggaacaucgaggacaaucaggcccaucugcagggcgagccuaucgagguugacaaccugccugaggacaugggcagacugcaccuggaugauggcaagagcccuaauccuggcgagauggccaaagucggcgagggcaaguaccgcgaggacuuccaaauggacgagggcgaagaucccagcuuccuguuccaguccuaccuggaaaacgugggcgugcagaucgugcggcagaugagaagcggcgagcgguuccugaagaucuggucccagaccguggaagagaucaucagcuacguggccgugaacuuccccaauccuccaggcaagagcagcgaggacaagagcacacagaccaccggcagagagcugaagaaagagacaaccccuacaccuagccagagagagagccagagcagcaaggccagaauggccgcucagacagcuucuggaccuccugcacuugaguggagcgccaccaacgagaaggacgaccugucuguggaagccgagaucgcccaccagaucgccgagagcuucagcaagaaguacaaguuccccagcagaagcagcggcauccugcuguacaacuucgagcagcugaagaugaaccuggacgacaucgugaaagaggccaagaacguccccggcgugacaagacuggcccacgauggaucuaagcugccccugagaugugugcucggauggguugcccuggccaacagcaagaaauuccagcugcugguggaaagcgacaagcuguccaagaucaugcaggacgaucugaaccgguacaccagcugc

SEQ ID NO: 411 - protein, 441 aa, porcine epidemic diarrhea virus
MASVSFQDRGRKRVPLSLYAPLRVTNDKPLSKVLANNAVPTNKGNKDQQIGYWNEQIRWRMRRGERIEQPSNWHFYYLGTGPHGDLRYRTRTEGVFWVAKEGAKTEPTNLGVRKASEKPIIPKFSQQLPSVVEIVEPNTPPASRANSRSRSRGNGNNRSRSPSNNRGNNQSRGNSQNRGNNQGRGASQNRGGNNNNNNKSRNQSNNRNQSNDRGGVTSRDDLVAAVKDALKSLGIGENPDRHKQQQKPKQEKSDNSGKNTPKKNKSRATSKERDLKDIPEWRRIPKGENSVAACFGPRGGFKNFGDAEFVEKGVDASGYAQIASLAPNVAALLFGGNVAVRELADSYEITYNYKMTVPKSDPNVELLVSQVDAFKTGNAKLQRKKEKKNKRETTLQQHEEAIYDDVGAPSDVTHANLEWDTAVDGGDTAVEIINEIFDTGN

SEQ ID NO: 412 - DNA, 1323 bp, porcine epidemic diarrhea virus
atggcttctgtcagctttcaggatcgtggccgcaaacgggtgccattatctctctatgcccctcttagggttactaatgacaagcccctttctaaggtacttgcaaacaacgctgtacccactaacaaggggaataaggaccagcaaattgggtactggaatgagcaaattcgctggcgcatgcgccgtggtgagcgaattgaacaaccttccaattggcatttctactacctcggaacaggacctcacggcgacctccgttataggactcgtactgagggtgttttctgggttgctaaagaaggcgcaaagactgaacccactaatttgggtgtcagaaaggcgtctgaaaagccaatcattccaaaattctctcaacagctccccagtgtagttgagattgttgaacctaacacacctcctgcttcacgtgcaaattcgcgtagcaggagtcgtggcaatggcaacaataggtctagatctccaagtaacaacagaggcaataaccagtcccgtggtaattcacagaatcgtggaaataaccagggtcgtggagcttctcagaacagaggaggcaataataataacaataacaagtctcgtaaccagtccaataacaggaaccagtcaaatgaccgtggtggtgtaacatcacgcgatgatctggtggctgctgtcaaggatgcacttaaatctttgggtattggagaaaatcctgacaggcataagcaacagcagaagcctaagcaggaaaagtctgacaacagcggcaaaaatacacctaagaagaacaaatccagggccacttcgaaggaacgtgacctcaaagacatcccagagtggaggagaattcccaagggcgaaaatagcgtagcagcttgcttcggacccagagggggcttcaaaaactttggagatgcggaatttgtcgaaaaaggtgttgatgcgtcaggctatgctcagatcgccagtttagcaccaaatgttgcagcattgctctttggtggtaatgtggctgttcgtgagctagcggactcttacgagattacatacaactataaaatgactgtgccaaagtcagatccaaatgttgagcttcttgtttcacaggtggatgcatttaaaactgggaatgcaaaactccagagaaagaaggaaaagaagaacaagcgtgaaaccacgctgcagcagcatgaagaggccatctacgatgatgtgggtgcgccatctgatgtgacccatgccaatctggaatgggacacagctgttgatggtggtgatacggccgttgaaattatcaacgagatcttcgatacaggaaat

SEQ ID NO: 413 - DNA, 1323 bp, Artificial Sequence
  Codon optimised DNA encoding PEDV N protein
atggccagcgtcagctttcaggaccggggcagaaaaagagtgcccctgtctctgtacgcccctctgagagtgaccaacgacaagcccctgagcaaggtgctggccaacaatgccgtgcctaccaacaagggcaacaaggaccagcagatcggctactggaacgagcagatccggtggcggatgagaagaggcgagagaatcgagcagcccagcaactggcacttctactacctcggcacaggccctcacggcgacctgagatacagaaccagaaccgagggcgtgttctgggtcgccaaagagggcgccaagaccgagcctacaaatctcggcgtcagaaaggccagcgagaagcctatcatccccaagttcagccagcagctgcccagcgtggtggaaatcgtggaacccaatactcctcctgccagccgggccaacagcagaagcagatctagaggcaacggcaacaatcggagcagaagccccagcaacaaccggggcaacaaccagtccagaggcaacagccagaaccgcggaaacaatcaaggcagaggcgctagccagaacagaggcggcaacaacaacaataacaacaagagccggaaccagtctaacaaccgcaaccagagcaacgatagaggcggcgtgaccagcagggatgatctggtggctgccgtgaaggatgccctgaagtctctcggcatcggcgagaaccccgacagacacaagcagcagcagaaacccaagcaagagaagtccgacaacagcggcaagaacacccctaagaagaacaagagcagggccaccagcaaagagcgggacctgaaggatattcccgagtggcggagaatccccaagggcgagaattctgtggccgcctgctttggaccaagaggcggcttcaagaatttcggcgacgccgagttcgtggaaaaaggcgtggacgcctctggctatgcccagattgcatctctggcccctaatgtggctgccctgctgtttggcggaaacgtggccgttagagagctggccgatagctacgagatcacctacaactacaagatgaccgtgcctaagagcgaccccaacgtggaactgctggtgtctcaggtggacgcattcaagaccggcaacgccaagctgcagcgcaagaaagagaagaaaaacaagcgcgagacaaccctgcagcagcacgaggaagctatctacgacgacgtgggagccccttccgatgtgacacacgccaacctggaatgggacacagcagtggatggcggcgataccgccgtggaaatcatcaacgagatcttcgacaccggcaac

SEQ ID NO: 414 - RNA, 1323 nt, Artificial Sequence
  Codon optimised RNA encoding PEDV N protein
auggccagcgucagcuuucaggaccggggcagaaaaagagugccccugucucuguacgccccucugagagugaccaacgacaagccccugagcaaggugcuggccaacaaugccgugccuaccaacaagggcaacaaggaccagcagaucggcuacuggaacgagcagauccgguggcggaugagaagaggcgagagaaucgagcagcccagcaacuggcacuucuacuaccucggcacaggcccucacggcgaccugagauacagaaccagaaccgagggcguguucugggucgccaaagagggcgccaagaccgagccuacaaaucucggcgucagaaaggccagcgagaagccuaucauccccaaguucagccagcagcugcccagcgugguggaaaucguggaacccaauacuccuccugccagccgggccaacagcagaagcagaucuagaggcaacggcaacaaucggagcagaagccccagcaacaaccggggcaacaaccaguccagaggcaacagccagaaccgcggaaacaaucaaggcagaggcgcuagccagaacagaggcggcaacaacaacaauaacaacaagagccggaaccagucuaacaaccgcaaccagagcaacgauagaggcggcgugaccagcagggaugaucugguggcugccgugaaggaugcccugaagucucucggcaucggcgagaaccccgacagacacaagcagcagcagaaacccaagcaagagaaguccgacaacagcggcaagaacaccccuaagaagaacaagagcagggccaccagcaaagagcgggaccugaaggauauucccgaguggcggagaauccccaagggcgagaauucuguggccgccugcuuuggaccaagaggcggcuucaagaauuucggcgacgccgaguucguggaaaaaggcguggacgccucuggcuaugcccagauugcaucucuggccccuaauguggcugcccugcuguuuggcggaaacguggccguuagagagcuggccgauagcuacgagaucaccuacaacuacaagaugaccgugccuaagagcgaccccaacguggaacugcuggugucucagguggacgcauucaagaccggcaacgccaagcugcagcgcaagaaagagaagaaaaacaagcgcgagacaacccugcagcagcacgaggaagcuaucuacgacgacgugggagccccuuccgaugugacacacgccaaccuggaaugggacacagcaguggauggcggcgauaccgccguggaaaucaucaacgagaucuucgacaccggcaac

SEQ ID NO: 415 - protein, 512 aa, human herpesvirus 1
MATDIDMLIDLGLDLSDSDLDEDPPEPAESRRDDLESDSSGECSSSDEDMEDPHGEDGPEPILDAARPAVRPSRPEDPGVPSTQTPRPTERQGPNDPQPAPHSVWSRLGARRPSCSPEQHGGKVARLQPPPTKAQPARGGRRGRRRGRGRGGPGAADGLSDPRRRAPRTNRNPGGPRPGAGWTDGPGAPHGEAWRGSEQPDPPGGQRTRGVRQAPPPLMTLAIAPPPADPRAPAPERKAPAADTIDATTRLVLRSISERAAVDRISESFGRSAQVMHDPFGGQPFPAANSPWAPVLAGQGGPFDAETRRVSWETLVAHGPSLYRTFAGNPRAASTAKAMRDCVLRQENFIEALASADETLAWCKMCIHHNLPLRPQDPIIGTTAAVLDNLATRLRPFLQCYLKARGLCGLDELCSRRRLADIKDIASFVFVILARLANRVERGVAEIDYATLGVGVGEKMHFYLPGACMAGLIEILDTHRQECSSRVCELTASHIVAPPYVHGKYFYCNSLF

SEQ ID NO: 416 - DNA, 1536 bp, human herpesvirus 1
atggcgactgacattgatatgctaattgacctcggcctggacctctccgacagcgatctggacgaggacccccccgagccggcggagagccgccgcgacgacctggaatcggacagcagcggggagtgttcctcgtcggacgaggacatggaagacccccacggagaggacggaccggagccgatactcgacgccgctcgcccggcggtccgcccgtctcgtccagaagaccccggcgtacccagcacccagacgcctcgtccgacggagcggcagggccccaacgatcctcaaccagcgccccacagtgtgtggtcgcgcctcggggcccggcgaccgtcttgctcccccgagcagcacgggggcaaggtggcccgcctccaacccccaccgaccaaagcccagcctgcccgcggcggacgccgtgggcgtcgcaggggtcggggtcgcggtggtcccggggctgccgatggtttgtcggacccccgccggcgtgcccccagaaccaatcgcaaccctgggggaccccgccccggggcggggtggacggacggccccggcgccccccatggcgaggcgtggcgcggcagtgagcagcccgacccacccggaggccagcggacacggggcgtgcgccaagcaccccccccgctaatgacgctggcgattgcccccccgcccgcggacccccgcgccccggccccggagcgaaaggcgcccgccgccgacaccatcgacgccaccacgcggttggtcctgcgctccatctccgagcgcgcggcggtcgaccgcatcagcgagagctttggccgcagcgcacaggtcatgcacgacccctttggggggcagccgtttcccgccgcgaatagcccctgggccccggtgctggcgggccaaggagggccctttgacgccgagaccagacgggtctcctgggaaaccttggtcgcccacggcccgagcctctatcgcacttttgccggcaatcctcgggccgcatcgaccgccaaggccatgcgcgactgcgtgctgcgccaagaaaatttcatcgaggcgctggcctccgccgacgagacgctggcgtggtgcaagatgtgcatccaccacaacctgccgctgcgcccccaggaccccattatcgggacgaccgcggctgtgctggataacctcgccacgcgcctgcggccctttctccagtgctacctgaaggcgcgaggcctgtgcggcctggacgaactgtgttcgcggcggcgtctggcggacattaaggacattgcatccttcgtgtttgtcattctggccaggctcgccaaccgcgtcgagcgtggcgtcgcggagatcgactacgcgacccttggtgtcggggtcggagagaagatgcatttctacctccccggggcctgcatggcgggcctgatcgaaatcctagacacgcaccgccaggagtgttcgagtcgtgtctgcgagttgacggccagtcacatcgtcgcccccccgtacgtgcacggcaaatatttttattgcaactccctgttt

SEQ ID NO: 417 - DNA, 1536 bp, Artificial Sequence
  Codon optimised DNA encoding HSV1 ICP27 protein
atggccaccgacatcgacatgctgatcgacctgggcctcgacctgagcgactctgacctggatgaagatcctcctgagcctgccgagagcagaagggacgatctggaaagcgatagcagcggcgagtgtagcagcagcgacgaggacatggaagatccccacggcgaggatggacctgagcctattctggatgccgccagacctgccgtcagaccttctagacctgaagatccaggcgtgcccagcacacagacccctagacctacagagagacagggccccaacgatcctcagcctgctcctcatagcgtgtggtctagactgggagccagaaggcctagctgtagccctgaacagcacggcggaaaagtggccagactgcagcctcctccaacaaaggctcaacctgctagaggcggcagacggggcagaagaagaggtagaggaagaggtggacctggcgccgctgatggactgtctgatcctagaagaagggcccctcggaccaacagaaatcctggcggacctagaccaggcgccggatggacagatggaccaggtgctccacatggcgaggcttggagaggatctgagcagcctgatcctccaggcggccaaagaacaagaggcgttagacaggctcctcctcctctgatgaccctggctattgctcctccaccagccgatcctagagcacccgctccagaaagaaaagcccctgccgccgataccatcgacgccacaacaagactggtgctgcggagcatctctgagagggccgctgtggatagaatcagcgagagctttgggagaagcgcccaagtgatgcacgacccttttggcggccagccttttcctgccgccaattctccttgggctcctgtgcttgctggacaaggcggcccttttgacgccgagacaagaagagtgtcctgggagacactggtggcccacggacctagcctgtacagaacattcgccggcaatccaagagccgccagcacagccaaagccatgagagactgcgtgctgagacaagagaacttcatcgaggccctggccagcgccgatgagacacttgcttggtgcaagatgtgcatccaccacaacctgcctctgaggccacaggaccctatcatcggaacaacagctgccgtgctggataacctggctaccagactgaggcccttcctgcagtgctacctgaaggccagaggactgtgtggcctggatgagctgtgctccagaagaaggctggctgacatcaaggatatcgccagcttcgtgttcgtgattctggcccggctggccaacagagtggaaagaggcgtggccgagatcgactatgccacactcggagttggcgtgggcgagaagatgcacttttatctgcctggcgcctgcatggccggcctgatcgaaattctggacacccacagacaagagtgcagctccagagtgtgcgagctgacagcctctcacattgtggcccctccatacgtgcacggcaagtacttctactgcaacagcctgttc

SEQ ID NO: 418 - RNA, 1536 nt, Artificial Sequence
  Codon optimised RNA encoding HSV1 ICP27 protein
auggccaccgacaucgacaugcugaucgaccugggccucgaccugagcgacucugaccuggaugaagauccuccugagccugccgagagcagaagggacgaucuggaaagcgauagcagcggcgaguguagcagcagcgacgaggacauggaagauccccacggcgaggauggaccugagccuauucuggaugccgccagaccugccgucagaccuucuagaccugaagauccaggcgugcccagcacacagaccccuagaccuacagagagacagggccccaacgauccucagccugcuccucauagcguguggucuagacugggagccagaaggccuagcuguagcccugaacagcacggcggaaaaguggccagacugcagccuccuccaacaaaggcucaaccugcuagaggcggcagacggggcagaagaagagguagaggaagagguggaccuggcgccgcugauggacugucugauccuagaagaagggccccucggaccaacagaaauccuggcggaccuagaccaggcgccggauggacagauggaccaggugcuccacauggcgaggcuuggagaggaucugagcagccugauccuccaggcggccaaagaacaagaggcguuagacaggcuccuccuccucugaugacccuggcuauugcuccuccaccagccgauccuagagcacccgcuccagaaagaaaagccccugccgccgauaccaucgacgccacaacaagacuggugcugcggagcaucucugagagggccgcuguggauagaaucagcgagagcuuugggagaagcgcccaagugaugcacgacccuuuuggcggccagccuuuuccugccgccaauucuccuugggcuccugugcuugcuggacaaggcggcccuuuugacgccgagacaagaagaguguccugggagacacugguggcccacggaccuagccuguacagaacauucgccggcaauccaagagccgccagcacagccaaagccaugagagacugcgugcugagacaagagaacuucaucgaggcccuggccagcgccgaugagacacuugcuuggugcaagaugugcauccaccacaaccugccucugaggccacaggacccuaucaucggaacaacagcugccgugcuggauaaccuggcuaccagacugaggcccuuccugcagugcuaccugaaggccagaggacuguguggccuggaugagcugugcuccagaagaaggcuggcugacaucaaggauaucgccagcuucguguucgugauucuggcccggcuggccaacagaguggaaagaggcguggccgagaucgacuaugccacacucggaguuggcgugggcgagaagaugcacuuuuaucugccuggcgccugcauggccggccugaucgaaauucuggacacccacagacaagagugcagcuccagagugugcgagcugacagccucucacauuguggccccuccauacgugcacggcaaguacuucuacugcaacagccuguuc

SEQ ID NO: 419 - protein, 247 aa, human herpesvirus 1
MAADAPGDRMEEPLPDRAVPIYVAGFLALYDSGDSGELALDPDTVRAALPPDNPLPINVDHRAGCEVGRVLAVVDDPRGPFFVGLIACVQLERVLETAASAAIFERRGPPLSREERLLYLITNYLPSVSLATKRLGGEAHPDRTLFAHVALCAIGRRLGTIVTYDTGLDAAIAPFRHLSPASREGARRLAAEAELALSGRTWAPGVEALTHTLLSTAVNNMMLRDRWSLVAERRRQAGIAGHTYLQA

SEQ ID NO: 420 - DNA, 741 bp, human herpesvirus 1
atggcagccgatgccccgggagacaggatggaggagcccctgccagacagggccgtgcccatttacgtggctgggtttttggccctgtatgacagcggggactcgggcgagttggcattggatccggatacggtgcgggcggccctgcctccggataacccactcccgattaacgtggaccaccgcgctggctgcgaggtggggcgggtgctggccgtggtcgacgacccccgcgggccgttttttgtggggctgatcgcctgcgtgcagctggagcgcgtcctcgagacggccgccagcgctgcgattttcgagcgccgcgggccgccgctctcccgggaggagcgcctgttgtacctgatcaccaactacctgccctcggtctccctggccacaaaacgcctggggggcgaggcgcaccccgatcgcacgctgttcgcgcacgtcgcgctgtgcgcgatcgggaggcgcctcggcactatcgtcacctacgacaccggtctcgacgccgccatcgcgccctttcgccacctgtcgccggcgtctcgcgagggggcgcggcgactggccgccgaggccgagctcgcgctgtccggacgcacctgggcgcccggcgtggaggcgctgacccacacgctgctttccaccgccgttaacaacatgatgctgcgggaccgctggagcctggtggccgagcggcggcggcaggccgggattgccggacacacctacctccaggcg

SEQ ID NO: 421 - DNA, 741 bp, Artificial Sequence
  Codon optimised DNA encoding HSV1 VP24 protein
atggctgctgatgcccctggcgacagaatggaagaacccctgcctgatagagccgtgcctatctacgtggccggatttctggccctgtacgactctggcgattctggcgaactggccctggatcctgatacagtcagagccgctctgcctcctgacaaccctctgccaatcaacgtggaccacagagccggctgtgaagtgggaagagtgctggccgtggtggacgatcctagaggccctttctttgtgggcctgatcgcctgcgtgcagctggaaagagttctggaaacagccgccagcgccgccatcttcgaaagaagaggacctcctctgagccgggaagagagactgctgtacctgatcaccaactacctgcctagcgtgtccctggccacaaagagacttggcggagaggcccatcctgacagaaccctgtttgcccatgtggccctgtgtgccattggtagaaggctgggcaccatcgtgacctacgatacaggactggacgccgctatcgccccattcagacatctgagccctgccagcagagaaggcgccagaaggcttgctgctgaagccgaactggctctgagcggcagaacatgggctccaggtgttgaagccctgacacacaccctgctgagcaccgccgtgaacaacatgatgctgcgggacagatggtccctggtggccgagagaagaaggcaggctggaattgccggccacacatatctgcaggct

SEQ ID NO: 422 - RNA, 663 nt, Artificial Sequence
  Codon optimised RNA encoding HSV1 VP24
cuggcccuguacgacucuggcgauucuggcgaacuggcccuggauccugauacagucagagccgcucugccuccugacaacccucugccaaucaacguggaccacagagccggcugugaagugggaagagugcuggccgugguggacgauccuagaggcccuuucuuugugggccugaucgccugcgugcagcuggaaagaguucuggaaacagccgccagcgccgccaucuucgaaagaagaggaccuccucugagccgggaagagagacugcuguaccugaucaccaacuaccugccuagcgugucccuggccacaaagagacuuggcggagaggcccauccugacagaacccuguuugcccauguggcccugugugccauugguagaaggcugggcaccaucgugaccuacgauacaggacuggacgccgcuaucgccccauucagacaucugagcccugccagcagagaaggcgccagaaggcuugcugcugaagccgaacuggcucugagcggcagaacaugggcuccagguguugaagcccugacacacacccugcugagcaccgccgugaacaacaugaugcugcgggacagauggucccugguggccgagagaagaaggcaggcuggaauugccggccacacauaucugcaggcu

SEQ ID NO: 423 - protein, 1174 aa, Murine Cytomegalovirus
MDRQPKVYSDPDNGFFFLDVPMPDDGQGGQQTATTAAGGAFGVGGGHSVPYVRIMNGVSGIQIGNHNAMSIASCWSPSYTDRRRRSYPKTATNAAADRVAAAVSAANAAVNAAAAAAAAGGGGGANLLAAAVTCANQRGCCGGNGGHSLPPTRMPKTNATAAAAPAVAGASNAKSDNNHANATSGAGSAAATPAATTPAATAVENRRPSPSPSTASTAPCDEGSSPRHHRPSHVSVGTQATPSTPIPIPAPRCSTGQQQQQPQAKKLKPAKADPLLYAATMPPPASVTTAAAAAVAPESESSPAASAPPAAAAMATGGDDEDQSSFSFVSDDVLGEFEDLRIAGLPVRDEMRPPTPTMTVIPVSRPFRAGRDSGRDALFDDAVESVRCYCHGILGNSRFCALVNEKCSEPAKERMARIRRYAADVTRCGPLALYTAIVSSANRLIQTDPSCDLDLAECYVETASKRNAVPLSAFYRDCDRLRDAVAAFFKTYGMVVDAMAQRITERVGPALGRGLYSTVVMMDRCGNSFQGREETPISVFARVAAALAVECEVDGGVSYKILSSKPVDAAQAFDAFLSALCSFAIIPSPRVLAYAGFGGSNPIFDAVSYRAQFYSAESTINGTLHDICDMVTNGLSVSVSAADLGGDIVASLHILGQQCKALRPYARFKTVLRIYFDIWSVDALKIFSFILDVGREYEGLMAFAVNTPRIFWDRYLDSSGDKMWLMFARREAAALCGLDLKSFRNVYEKMERDGRSAITVSPWWAVCQLDACVARGNTAVVFPHNVKSMIPENIGRPAVCGPGVSVVSGGFVGCTPIHELCINLENCVLEGAAVESSVDVVLGLGCRFSFKALESLVRDAVVLGNLLIDMTVRTNAYGAGKLLTLYRDLHIGVVGFHAVMNRLGQKFADMESYDLNQRIAEFIYYTAVRASVDLCMAGADPFPKFPKSLYAAGRFYPDLFDDDERGPRRMTKEFLEKLREDVVKHGIRNASFITGCSADEAANLAGTTPGFWPRRDNVFLEQTPLMMTPTKDQMLDECVRSVKIEPHRLHEEDLSCLGENRPVELPVLNSRLRQISKESATVAVRRGRSAPFYDDSDDEDEVACSETGWTVSTDAVIKMCVDRQPFVDHAQSLPVAIGFGGSSVELARHLRRGNALGLSVGVYKCSMPPSVNYR

SEQ ID NO: 424 - DNA, 3522 bp, Murine Cytomegalovirus
atggatcgccagcccaaagtctactccgacccggacaacggattcttctttttggatgtccccatgcctgacgacgggcagggaggccagcagaccgccaccaccgctgccgggggagccttcggggtgggtggggggcacagcgtgccctacgtcaggatcatgaatggagtctctggaatacagatcggaaaccataatgctatgagcatcgcctcttgctggagtccctcctacactgaccgacgccgcaggagctaccccaagaccgcgaccaacgcggcggcagacagggtcgccgctgccgtctccgccgccaatgctgctgtcaatgctgctgccgcggctgctgccgccggcgggggcggcggcgctaacctactggctgctgctgtcacttgtgcaaatcagcgaggttgctgcggaggaaatggggggcattccctccctcccacccgaatgccgaagaccaacgctaccgccgcggccgctcctgccgtcgccggtgcttccaacgccaagagtgacaacaatcacgctaacgccacctctggtgctggatccgcggccgccacccccgccgccaccacccccgccgccaccgccgtcgaaaaccgacgacccagcccgagcccctctacagcctcgactgcgccctgtgacgagggatcttctcctcgccaccatcgtcctagtcacgttagtgtcggcactcaggcgactccgtcgactcctatcccgattcccgctccccggtgcagcacaggccaacaacaacagcaacctcaagccaagaagcttaagcccgctaaagctgatcccctcctgtacgcggcgacgatgccgcctcccgcgagcgtaacgaccgccgctgccgctgccgtcgcccctgaatccgaatcctcacctgccgcttcggcaccaccagcagcagcagcgatggcgaccgggggagacgacgaagatcagtcgtctttctcgttcgtgagcgacgacgtcctcggagaattcgaagatctgcgcatcgccgggctccccgtcagggacgagatgcgccccccgaccccgacgatgacggtcattcccgtcagcaggcccttccgcgcggggcgcgacagcgggcgcgacgccttgtttgacgacgccgtcgagtccgtgcgctgctactgccacggcatcctcggcaacagccgattctgcgccctcgtcaacgagaagtgctccgaacccgccaaggagcgcatggctcgcatccgccgctacgccgcggacgtgacgcgctgcggacccctcgcgctctacaccgccatcgtctccagcgccaaccgtctcatccagaccgacccgtcgtgcgacctggatctcgccgaatgttacgtcgagacggcgtccaagaggaacgccgtccccctctcggccttctaccgcgactgcgatcgcctgcgggatgctgtcgccgcgttcttcaagacctacggcatggtggtggacgccatggcgcagcgcatcacggagcgggtcgggccggccctgggtaggggcctctactcgaccgtcgtcatgatggatcgctgcggaaacagcttccagggacgcgaggagacccccatctccgtcttcgcccgggtcgccgcggctctcgccgtcgagtgcgaggtcgacgggggcgtctcgtacaagatcctcagctccaagcccgtcgacgccgcgcaggccttcgacgccttcctctccgccctctgctccttcgccatcatcccctcgccgcgggtcctggcctacgccgggttcggcggttccaacccgatcttcgacgccgtttcttaccgcgctcagttctactcggccgagagcacgatcaacggcaccctgcacgacatctgcgacatggtgaccaacggcctctcggtgtccgtcagcgcggcggacctcggaggcgacatcgtggcctctctgcacatcctcggacagcagtgcaaggcgctgcggccgtacgcgcgattcaagaccgtcttgaggatctacttcgacatctggtccgtcgacgctctcaagatcttctctttcatcctcgacgtcgggcgggaatacgagggcctgatggccttcgcggtcaacacgccgaggatcttctgggatcgctacctagacagctccggcgacaagatgtggctcatgttcgcgaggcgggaggccgcggccctgtgcggcctcgacctcaagtccttccgtaacgtctacgagaagatggagcgtgacgggcgcagcgccatcaccgtctcgccctggtgggccgtctgtcagctcgacgcgtgcgtggcgcggggcaacacggccgtggtcttccctcacaacgtcaagagtatgatccccgagaacatcgggcgccccgccgtgtgcggacccggcgtctccgtcgtctccggcggcttcgtcggctgtacccccatccacgagctgtgcatcaacctggagaactgcgtcctggagggcgcggcagtcgagagctccgtcgacgtggtcctcggtctcggttgccgcttcagcttcaaggccctggagtccctggtccgcgacgcggtggtgctgggtaacctgctcatcgacatgaccgtgcgcaccaacgcgtacggcgccggcaagctcctgacgctctatcgcgacctgcacatcggggtcgtcggcttccacgctgtgatgaatcgcctcgggcagaagttcgccgacatggagtcttacgacctcaaccagcgtatcgcggagtttatctactacaccgccgtgcgggccagcgtcgacctgtgcatggcgggcgccgatccgttccccaagttccctaagagcctgtacgcggccggccgcttctaccccgacctcttcgacgacgacgagcgcggcccgcgtcgcatgaccaaggagttcctcgagaaactacgtgaagacgtggtgaaacacggcatcaggaacgcctccttcatcaccggctgctcggccgacgaagccgccaacctggcgggcaccactccgggcttctggccgcgccgcgacaacgtctttctcgagcagacgccgctcatgatgaccccgacgaaggatcagatgctcgatgagtgcgtgcgctccgtcaagatcgagccccatcgcctgcacgaggaggatctctcctgtctcggcgagaaccggcccgtcgagctgcccgtgctcaacagccgcctcaggcagatctcgaaagagtccgcgacggtcgccgtgcgccgcggccgctcggcgcccttctacgacgactcggacgacgaggacgaggtggcgtgctccgagaccggctggaccgtgtcgaccgacgcggtcatcaagatgtgcgtcgacagacagccgttcgtcgaccatgcgcagtcgctgcccgtcgccatcggcttcggggggtcttcggtggaattggcgcgtcatctgagacgagggaacgctctgggactgtccgtcggagtatataaatgtagtatgcccccttccgtgaattatcgc

SEQ ID NO: 425 - DNA, 3522 bp, Artificial Sequence
  Codon optimised DNA encoding Murine CTMV M45 protein
atggacagacagcccaaggtgtacagcgaccccgacaacggcttcttcttcctggatgtgcccatgcctgacgatggccaaggcggacagcagacagctacaacagctgccggcggagcctttggagttggcggaggacattctgtgccctacgtgcggatcatgaatggcgtgtccggcatccagatcggcaaccacaacgccatgtctatcgccagctgttggagccccagctacaccgatcggcggagaagaagctaccctaagaccgccacaaacgccgctgccgatagagtggctgctgctgtgtctgccgctaacgctgctgtgaatgctgctgccgctgctgcagccgcaggcggcggaggcggagctaatcttcttgcagcagccgtgacctgcgccaaccagagaggatgttgcggaggaaatggcggccacagcctgcctccaaccagaatgcctaagaccaatgccacagccgctgcagctccagcagttgccggtgcctctaatgccaagagcgacaacaaccacgccaacgccacatctggcgctggatctgctgctgctacaccagccgctacaacaccagctgccaccgccgttgagaacagaaggccatctccaagtcctagcaccgccagcacagccccttgtgatgagggaagcagccccagacaccacagacctagccatgtgtctgtgggcacacaggccacacctagcacaccaattcctattccagctcctcggtgctccacaggccagcagcaacaacagcctcaggccaagaagctgaagcccgccaaagctgaccctctgctgtatgccgcaaccatgcctcctccagcctctgtgactactgccgcagcagctgcagtggcccctgagtctgaatcttctcctgccgcttctgcccctccagcagccgccgctatggctacaggcggagatgatgaggaccagagcagcttctccttcgtgtccgatgatgtgctgggcgagttcgaggacctgagaattgctggactgcccgtgcgggatgagatgaggcctcctacacctaccatgacagtgatccccgtgtctcggcctttcagagccggcagagattctggcagagatgccctgttcgacgacgccgtggaaagcgtgcggtgttactgtcacggcatcctgggcaacagcagattctgcgccctggtcaacgagaagtgtagcgagcctgccaaagaacggatggcccggattagaagatacgccgccgacgtgacaagatgcggacctctggctctgtacaccgccattgtgtctagcgccaaccggctgatccagacagaccctagctgtgacctggatctggccgagtgctacgtggaaaccgcctccaagagaaacgccgtgcctctgagcgccttctacagagactgcgacagactgagagatgccgtggccgccttcttcaagacctacggcatggtggtggacgccatggctcagagaatcaccgagagagtgggacccgctctcggcagaggactgtattctaccgtggtcatgatggacagatgcggcaacagcttccagggcagagaagagacacccatcagcgtgttcgccagagtggctgctgctctggccgtggaatgtgaagtggatggcggcgtgtcctacaagatcctgagcagcaagcctgtggatgccgctcaggccttcgatgcctttctgagcgccctgtgcagcttcgccatcattccatctccaagagtgctggcctacgccggctttggcggcagcaatcctatctttgacgccgtgtcttacagggcccagttctacagcgccgagagcaccatcaatggcaccctgcacgacatctgcgacatggtcacaaacggcctgtccgtgtctgtgtctgccgctgatctcggcggagatatcgtggcctctctgcacattctgggccagcagtgcaaagccctgaggccttacgccagattcaagaccgtgctgcggatctacttcgacatttggagcgtggacgccctgaagatctttagcttcatcctggacgtggggcgcgagtacgaaggactgatggcctttgccgtgaatacccctcggatcttctgggacagatacctggacagcagcggcgacaagatgtggctgatgtttgccagaagagaagccgccgctctgtgcggcctggatctgaagtccttccggaacgtgtacgagaagatggaacgcgacggccgctctgccatcacagttagtccttggtgggccgtgtgtcagctggatgcctgtgtggccagaggcaataccgccgtggtgttccctcacaacgtgaagtctatgatccccgagaacatcggcaggccagccgtgtgtggacctggcgttagtgttgtgtctggcggcttcgtgggctgcacacctattcacgagctgtgcatcaacctggaaaactgcgtgctggaaggcgccgctgtggaatcctctgtggatgtggtgctcggcctgggctgcagattcagctttaaggccctggaaagcctcgtgcgggatgctgtggttctgggcaacctgctgatcgacatgaccgtgcggaccaatgcctatggcgctggcaaactgctgaccctgtaccgggatctgcacatcggcgttgtgggattccacgccgtgatgaacagactgggccagaaattcgccgacatggaaagctacgacctgaaccagcggatcgccgagttcatctactacacagccgtcagagccagcgtggacctgtgtatggctggcgccgatccatttcctaagttccccaagagcctgtacgccgctggcagattctaccccgacctgttcgacgacgatgagaggggccctagacggatgaccaaagagttcctggaaaagctgagggaagatgtggtcaagcacggcatccggaacgccagctttatcacaggctgtagcgccgacgaggccgccaatcttgctggaacaacacccggcttttggcccagacgggacaatgtgtttctggaacagacccctctgatgatgacccctaccaaggaccagatgctggacgagtgcgtgcggagcgtgaagatcgaacctcacagactgcacgaagaggacctgagctgcctgggcgagaacagacctgtggaactgcccgtgctgaacagcagactgcggcagatcagcaaagaaagcgccaccgtggccgtgcggagaggaagaagtgctccattctacgacgacagcgacgacgaggatgaagtggcctgttctgagacaggctggaccgtgtctaccgatgccgtgatcaagatgtgcgtggacagacagcccttcgtggatcacgctcagtctctgcctgtggccatcggctttggaggctctagcgtggaactggccagacacctgagaagaggcaatgccctgggactgtctgtgggcgtgtacaagtgtagcatgcctcctagcgtgaactaccgg

SEQ ID NO: 426 - RNA, 3522 nt, Artificial Sequence
  Codon optimised RNA encoding Murine CTMV M45 protein
auggacagacagcccaagguguacagcgaccccgacaacggcuucuucuuccuggaugugcccaugccugacgauggccaaggcggacagcagacagcuacaacagcugccggcggagccuuuggaguuggcggaggacauucugugcccuacgugcggaucaugaauggcguguccggcauccagaucggcaaccacaacgccaugucuaucgccagcuguuggagccccagcuacaccgaucggcggagaagaagcuacccuaagaccgccacaaacgccgcugccgauagaguggcugcugcugugucugccgcuaacgcugcugugaaugcugcugccgcugcugcagccgcaggcggcggaggcggagcuaaucuucuugcagcagccgugaccugcgccaaccagagaggauguugcggaggaaauggcggccacagccugccuccaaccagaaugccuaagaccaaugccacagccgcugcagcuccagcaguugccggugccucuaaugccaagagcgacaacaaccacgccaacgccacaucuggcgcuggaucugcugcugcuacaccagccgcuacaacaccagcugccaccgccguugagaacagaaggccaucuccaaguccuagcaccgccagcacagccccuugugaugagggaagcagccccagacaccacagaccuagccaugugucugugggcacacaggccacaccuagcacaccaauuccuauuccagcuccucggugcuccacaggccagcagcaacaacagccucaggccaagaagcugaagcccgccaaagcugacccucugcuguaugccgcaaccaugccuccuccagccucugugacuacugccgcagcagcugcaguggccccugagucugaaucuucuccugccgcuucugccccuccagcagccgccgcuauggcuacaggcggagaugaugaggaccagagcagcuucuccuucguguccgaugaugugcugggcgaguucgaggaccugagaauugcuggacugcccgugcgggaugagaugaggccuccuacaccuaccaugacagugauccccgugucucggccuuucagagccggcagagauucuggcagagaugcccuguucgacgacgccguggaaagcgugcgguguuacugucacggcauccugggcaacagcagauucugcgcccuggucaacgagaaguguagcgagccugccaaagaacggauggcccggauuagaagauacgccgccgacgugacaagaugcggaccucuggcucuguacaccgccauugugucuagcgccaaccggcugauccagacagacccuagcugugaccuggaucuggccgagugcuacguggaaaccgccuccaagagaaacgccgugccucugagcgccuucuacagagacugcgacagacugagagaugccguggccgccuucuucaagaccuacggcauggugguggacgccauggcucagagaaucaccgagagagugggacccgcucucggcagaggacuguauucuaccguggucaugauggacagaugcggcaacagcuuccagggcagagaagagacacccaucagcguguucgccagaguggcugcugcucuggccguggaaugugaaguggauggcggcguguccuacaagauccugagcagcaagccuguggaugccgcucaggccuucgaugccuuucugagcgcccugugcagcuucgccaucauuccaucuccaagagugcuggccuacgccggcuuuggcggcagcaauccuaucuuugacgccgugucuuacagggcccaguucuacagcgccgagagcaccaucaauggcacccugcacgacaucugcgacauggucacaaacggccuguccgugucugugucugccgcugaucucggcggagauaucguggccucucugcacauucugggccagcagugcaaagcccugaggccuuacgccagauucaagaccgugcugcggaucuacuucgacauuuggagcguggacgcccugaagaucuuuagcuucauccuggacguggggcgcgaguacgaaggacugauggccuuugccgugaauaccccucggaucuucugggacagauaccuggacagcagcggcgacaagauguggcugauguuugccagaagagaagccgccgcucugugcggccuggaucugaaguccuuccggaacguguacgagaagauggaacgcgacggccgcucugccaucacaguuaguccuuggugggccgugugucagcuggaugccuguguggccagaggcaauaccgccgugguguucccucacaacgugaagucuaugauccccgagaacaucggcaggccagccguguguggaccuggcguuaguguugugucuggcggcuucgugggcugcacaccuauucacgagcugugcaucaaccuggaaaacugcgugcuggaaggcgccgcuguggaauccucuguggauguggugcucggccugggcugcagauucagcuuuaaggcccuggaaagccucgugcgggaugcugugguucugggcaaccugcugaucgacaugaccgugcggaccaaugccuauggcgcuggcaaacugcugacccuguaccgggaucugcacaucggcguugugggauuccacgccgugaugaacagacugggccagaaauucgccgacauggaaagcuacgaccugaaccagcggaucgccgaguucaucuacuacacagccgucagagccagcguggaccuguguauggcuggcgccgauccauuuccuaaguuccccaagagccuguacgccgcuggcagauucuaccccgaccuguucgacgacgaugagaggggcccuagacggaugaccaaagaguuccuggaaaagcugagggaagauguggucaagcacggcauccggaacgccagcuuuaucacaggcuguagcgccgacgaggccgccaaucuugcuggaacaacacccggcuuuuggcccagacgggacaauguguuucuggaacagaccccucugaugaugaccccuaccaaggaccagaugcuggacgagugcgugcggagcgugaagaucgaaccucacagacugcacgaagaggaccugagcugccugggcgagaacagaccuguggaacugcccgugcugaacagcagacugcggcagaucagcaaagaaagcgccaccguggccgugcggagaggaagaagugcuccauucuacgacgacagcgacgacgaggaugaaguggccuguucugagacaggcuggaccgugucuaccgaugccgugaucaagaugugcguggacagacagcccuucguggaucacgcucagucucugccuguggccaucggcuuuggaggcucuagcguggaacuggccagacaccugagaagaggcaaugcccugggacugucugugggcguguacaaguguagcaugccuccuagcgugaacuaccgg

SEQ ID NO: 427 - protein, 56 aa, Severe acute respiratory syndrome coronavirus 2
MMLTTSCVGILIVTTIVFHTIVQLLQLSLPPVMAQQIPLQNMTTKLVVILRNGNLE

SEQ ID NO: 428 - DNA, 168 bp, Severe acute respiratory syndrome coronavirus 2
atgatgctaactacttcctgtgttggcatactaattgttacgactattgtattccatacaatagtgcaacttcttcaattgtcattacctccggtgatggcacaacaaatcccattacagaacatgactaccaaattggtggttattttgagaaatgggaatctggag

SEQ ID NO: 429 - RNA, 168 nt, Severe acute respiratory syndrome coronavirus 2
augaugcuaacuacuuccuguguuggcauacuaauuguuacgacuauuguauuccauacaauagugcaacuucuucaauugucauuaccuccggugauggcacaacaaaucccauuacagaacaugacuaccaaauuggugguuauuuugagaaaugggaaucuggag

SEQ ID NO: 430 - DNA, 171 bp, Artificial Sequence
  Codon optimised DNA encoding Pangolin CoV-2 ORF3b*57
atgatgctgaccaccagctgtgtgggcatcctgatcgtgaccaccatcgtgttccacacaatcgtgcagctgctgcagctcagcctgcctcctgttatggcccagcagatccctctgcagaacatgaccacaaagctggtcgtgatcctgcggaacggcaacctggaatga

SEQ ID NO: 431 - RNA, 171 nt, Artificial Sequence
  Codon optimised RNA encoding Pangolin CoV-2 ORF3b*57
augaugcugaccaccagcugugugggcauccugaucgugaccaccaucguguuccacacaaucgugcagcugcugcagcucagccugccuccuguuauggcccagcagaucccucugcagaacaugaccacaaagcuggucgugauccugcggaacggcaaccuggaauga

SEQ ID NO: 432 - protein, 78 aa, Severe acute respiratory syndrome coronavirus 2
MMLTTSCVGILIVTTIVFHTIVQLLQLSLPPVMAQQIPLQNMTTKLVVILRNGNLELKTVLYYTATSLQITTSCTQLN

SEQ ID NO: 433 - DNA, 234 bp, Severe acute respiratory syndrome coronavirus 2
atgatgctaactacttcctgtgttggcatactaattgttacgactattgtattccatacaatagtgcaacttcttcaattgtcattacctccggtgatggcacaacaaatcccattacagaacatgactaccaaattggtggttattttgagaaatgggaatctggagctgaagactgtgttgtattacacagctacttcacttcagattactaccagctgtactcaactcaat

SEQ ID NO: 434 - RNA, 234 nt, Severe acute respiratory syndrome coronavirus 2
augaugcuaacuacuuccuguguuggcauacuaauuguuacgacuauuguauuccauacaauagugcaacuucuucaauugucauuaccuccggugauggcacaacaaaucccauuacagaacaugacuaccaaauuggugguuauuuugagaaaugggaaucuggagcugaagacuguguuguauuacacagcuacuucacuucagauuacuaccagcuguacucaacucaau

SEQ ID NO: 435 - DNA, 237 bp, Artificial Sequence
  Codon optimised DNA encoding Pangolin CoV-2 ORF3b*79
atgatgctgaccaccagctgtgtgggcatcctgatcgtgaccaccatcgtgttccacacaatcgtgcagctgctgcagctcagcctgcctcctgttatggcccagcagatccctctgcagaacatgaccacaaagctggtcgtgatcctgcggaacggcaacctggaactgaaaaccgtgctgtactacaccgccaccagcctgcagatcaccacaagctgcacccagctgaactga

SEQ ID NO: 436 - RNA, 237 nt, Artificial Sequence
  Codon optimised RNA encoding Pangolin CoV-2 ORF3b*79
augaugcugaccaccagcugugugggcauccugaucgugaccaccaucguguuccacacaaucgugcagcugcugcagcucagccugccuccuguuauggcccagcagaucccucugcagaacaugaccacaaagcuggucgugauccugcggaacggcaaccuggaacugaaaaccgugcuguacuacaccgccaccagccugcagaucaccacaagcugcacccagcugaacuga

SEQ ID NO: 437 - protein, 109 aa, Middle East Respiratory Syndrome virus
MDYVSLLNQIWQKYLNSPYTTCLYIPKPTAKYTPLVGTSLHPVLWNCQLSFAGYTESAVNSTKALAKQDAAQRIAWLLHKDGGIPDGCSLYLRHSSLFAQSEEEESFSN

SEQ ID NO: 438 - DNA, 327 bp, Middle East Respiratory Syndrome virus
atggactacgtgtccctgctgaaccagatttggcagaagtacctgaacagcccctacaccacctgtctgtacatccccaagcctaccgccaagtacacacctctcgtgggcacatctctgcaccccgtgctgtggaattgccagctgagctttgccggctacaccgagtctgccgtgaacagcacaaaggccctggccaaacaggacgccgctcagagaattgcctggctgctgcacaaggatggcggcatccctgatggctgtagcctgtacctgagacacagcagcctgttcgcccagagcgaggaagaggaatccttcagcaac

SEQ ID NO: 439 - RNA, 327 nt, Middle East Respiratory Syndrome virus
auggacuacgugucccugcugaaccagauuuggcagaaguaccugaacagccccuacaccaccugucuguacauccccaagccuaccgccaaguacacaccucucgugggcacaucucugcaccccgugcuguggaauugccagcugagcuuugccggcuacaccgagucugccgugaacagcacaaaggcccuggccaaacaggacgccgcucagagaauugccuggcugcugcacaaggauggcggcaucccugauggcuguagccuguaccugagacacagcagccuguucgcccagagcgaggaagaggaauccuucagcaac

SEQ ID NO: 440 - DNA, 330 bp, Artificial Sequence
  Codon optimised DNA encoding MERS-ORF4a
atggactacgtgtccctgctgaatcagatctggcagaagtacctgaacagcccctacaccacctgtctgtacatccccaagcctaccgccaagtacacacctctcgtgggcacatctctgcaccccgtgctgtggaattgccagctgagctttgccggctacaccgagagcgccgtgaatagcacaaaggccctggccaaacaggacgccgctcagagaattgcctggctgctgcacaaggatggcggcatccctgatggctgtagcctgtacctgagacacagcagcctgttcgcccagagcgaggaagaggaatccttcagcaactga

SEQ ID NO: 441 - RNA, 330 nt, Artificial Sequence
  Codon optimised RNA encoding MERS-ORF4a
auggacuacgugucccugcugaaucagaucuggcagaaguaccugaacagccccuacaccaccugucuguacauccccaagccuaccgccaaguacacaccucucgugggcacaucucugcaccccgugcuguggaauugccagcugagcuuugccggcuacaccgagagcgccgugaauagcacaaaggcccuggccaaacaggacgccgcucagagaauugccuggcugcugcacaaggauggcggcaucccugauggcuguagccuguaccugagacacagcagccuguucgcccagagcgaggaagaggaauccuucagcaacuga

SEQ ID NO: 442 - protein, 168 aa, Bovine viral diarrhea virus
MELITNELLYKTYKQKPVGVEEPVYDQAGDPLFGERGAVHPQSTLKLPHKRGERDVPTNLASLPKRGDCRTGNSRGPVSGIYLKPGPLFYQDYKGPVYHRAPLELFEEGSMCETTKRIGRVTGSDGKLYHIYVCIDGCIIIKSATRSYQRVFRWVHNRLDCPLWVTSC

SEQ ID NO: 443 - DNA, 504 bp, Bovine viral diarrhea virus
atggagttgatcacaaatgaacttttatacaaaacatacaaacaaaaacccgtcggggtggaggaacctgtttatgatcaggcaggtgatcccttatttggtgaaaggggagcagtccaccctcaatcgacgctaaagctcccacacaagagaggggaacgcgatgttccaaccaacttggcatccttaccaaaaagaggtgactgcaggacgggtaatagcagaggacctgtgagcgggatctacctgaagccagggccactattttaccaggactataaaggtcccgtctatcacagggccccgctggagctctttgaggagggatccatgtgtgaaacgactaaacggatagggagagtaactggaagtgacggaaagctgtaccacatttatgtgtgtatagatggatgtataataataaaaagtgccacgagaagttaccaaagggtgttcaggtgggtccataataggcttgactgccctctatgggtcacaagttgc

SEQ ID NO: 444 - RNA, 504 nt, Bovine viral diarrhea virus
auggaguugaucacaaaugaacuuuuauacaaaacauacaaacaaaaacccgucgggguggaggaaccuguuuaugaucaggcaggugaucccuuauuuggugaaaggggagcaguccacccucaaucgacgcuaaagcucccacacaagagaggggaacgcgauguuccaaccaacuuggcauccuuaccaaaaagaggugacugcaggacggguaauagcagaggaccugugagcgggaucuaccugaagccagggccacuauuuuaccaggacuauaaaggucccgucuaucacagggccccgcuggagcucuuugaggagggauccaugugugaaacgacuaaacggauagggagaguaacuggaagugacggaaagcuguaccacauuuauguguguauagauggauguauaauaauaaaaagugccacgagaaguuaccaaaggguguucagguggguccauaauaggcuugacugcccucuaugggucacaaguugc

SEQ ID NO: 445 - DNA, 507 bp, Artificial Sequence
  Codon optimised DNA encoding BVDV nPro
atggaactgatcaccaacgagctgctgtacaagacctacaagcagaaacccgtgggcgtcgaggaacccgtgtatgatcaagctggcgaccctctgtttggcgagagaggcgctgttcaccctcagagcacactgaagctgccccacaagcggggcgaaagagatgtgcctaccaacctggccagcctgcctaagagaggcgattgcagaaccggcaatagcagaggccctgtgtccggcatctacctgaaacctggaccactgttctaccaggactacaagggccccgtgtaccacagagcacccctggaacttttcgaagagggcagcatgtgcgaaaccaccaagcggatcggaagagtgaccggctctgacggcaagctgtaccacatctacgtgtgcatcgacggctgcatcatcatcaagagcgccaccagatcctaccagcgggtgttcagatgggtgcacaacagactggactgccctctgtgggtcaccagctgctga

SEQ ID NO: 446 - RNA, 507 nt, Artificial Sequence
  Codon optimised RNA encoding BVDV nPro
auggaacugaucaccaacgagcugcuguacaagaccuacaagcagaaacccgugggcgucgaggaacccguguaugaucaagcuggcgacccucuguuuggcgagagaggcgcuguucacccucagagcacacugaagcugccccacaagcggggcgaaagagaugugccuaccaaccuggccagccugccuaagagaggcgauugcagaaccggcaauagcagaggcccuguguccggcaucuaccugaaaccuggaccacuguucuaccaggacuacaagggccccguguaccacagagcaccccuggaacuuuucgaagagggcagcaugugcgaaaccaccaagcggaucggaagagugaccggcucugacggcaagcuguaccacaucuacgugugcaucgacggcugcaucaucaucaagagcgccaccagauccuaccagcggguguucagaugggugcacaacagacuggacugcccucugugggucaccagcugcuga

SEQ ID NO: 447 - protein, 197 aa, human herpesvirus 2
MVRDCYLMGYCRTRLGPRTWGRLLQISGGTWDVRLRNAIREVEAHFEPAAEPVCELPCLNARRYGPECDVGNLETNGGSTSDDEISDATDSDDTLASHSDTEGGPSPAGRENPESASGGAIAARLECEFGTFDWTSEEGSQPWLSAVVADTSSAERSGLPAPGACRATEAPEREDGCRKMRFPAACPYPCGHTFLRP

SEQ ID NO: 448 - DNA, 591 bp, human herpesvirus 2
atggtgcgagactgctacctcatgggctactgccggacccgcctggggccgcgcacgtggggccgcctgctgcagatctcgggcggaacctgggacgtgcgcctgcgaaacgcaatccgggaggtcgaggcgcattttgaacccgccgccgagcccgtgtgcgagctgccctgtctgaacgccaggcgttacggccccgagtgtgatgttggcaatctcgagaccaacggcggctcgacgagcgatgatgagatatcggatgcgacggactcggacgataccctcgcgtcccattccgacacggagggggggccctccccggccggccgggagaacccggaatccgcgtccggcggggctatcgcggctcggctggagtgtgagtttgggacgtttgactggacgtccgaggagggctcccagccctggctgtccgcggtggtcgccgataccagctccgccgaacgctctggcctacccgccccgggcgcgtgtcgcgcaacggaagccccagaacgcgaggacgggtgccgaaaaatgcgcttccccgccgcctgcccctatccctgcggccacacatttctccggcca

SEQ ID NO: 449 - RNA, 591 nt, human herpesvirus 2
auggugcgagacugcuaccucaugggcuacugccggacccgccuggggccgcgcacguggggccgccugcugcagaucucgggcggaaccugggacgugcgccugcgaaacgcaauccgggaggucgaggcgcauuuugaacccgccgccgagcccgugugcgagcugcccugucugaacgccaggcguuacggccccgagugugauguuggcaaucucgagaccaacggcggcucgacgagcgaugaugagauaucggaugcgacggacucggacgauacccucgcgucccauuccgacacggagggggggcccuccccggccggccgggagaacccggaauccgcguccggcggggcuaucgcggcucggcuggagugugaguuugggacguuugacuggacguccgaggagggcucccagcccuggcuguccgcgguggucgccgauaccagcuccgccgaacgcucuggccuacccgccccgggcgcgugucgcgcaacggaagccccagaacgcgaggacgggugccgaaaaaugcgcuuccccgccgccugccccuaucccugcggccacacauuucuccggcca

SEQ ID NO: 450 - DNA, 594 bp, Artificial Sequence
  Codon optimised DNA encoding HSV US1
atggtccgagactgctacctgatgggctactgcagaaccagactgggccctagaacatggggcagactgctgcagatctctggcggcacatgggatgtgcggctgagaaacgccatcagagaggtggaagcccacttcgagcctgccgctgaacctgtgtgtgaactgccctgtctgaacgctagaagatacggccctgagtgcgacgtgggcaacctggaaacaaatggcggcagcaccagcgacgacgagatctctgatgccaccgacagcgacgatacactggccagccacagcgatacagaaggcggaccatctcctgccggaagagagaatcctgagtctgcctctggcggagctatcgccgctagactggaatgcgagttcggcaccttcgactggacaagcgaggaaggctctcagccttggctgtctgctgtggtggccgatacaagcagcgccgaaagatctggacttcctgctcctggcgcctgcagagctacagaagctcctgaaagagaggacggctgcagaaagatgcggttccctgccgcctgtccttatccttgcggccacacatttctgcggccctga

SEQ ID NO: 451 - RNA, 594 nt, Artificial Sequence
  Codon optimised RNA encoding HSV US1
augguccgagacugcuaccugaugggcuacugcagaaccagacugggcccuagaacauggggcagacugcugcagaucucuggcggcacaugggaugugcggcugagaaacgccaucagagagguggaagcccacuucgagccugccgcugaaccugugugugaacugcccugucugaacgcuagaagauacggcccugagugcgacgugggcaaccuggaaacaaauggcggcagcaccagcgacgacgagaucucugaugccaccgacagcgacgauacacuggccagccacagcgauacagaaggcggaccaucuccugccggaagagagaauccugagucugccucuggcggagcuaucgccgcuagacuggaaugcgaguucggcaccuucgacuggacaagcgaggaaggcucucagccuuggcugucugcugugguggccgauacaagcagcgccgaaagaucuggacuuccugcuccuggcgccugcagagcuacagaagcuccugaaagagaggacggcugcagaaagaugcgguucccugccgccuguccuuauccuugcggccacacauuucugcggcccuga

SEQ ID NO: 452 - protein, 218 aa, Middle East Respiratory Syndrome virus
MSNMTQLTEAQIIAIIKDWNFAWSLIFLLITIVLQYGYPSRSMTVYVFKMFVLWLLWPSSMALSIFSAIYPIDLASQIISGIVAAVSAMMWISYFVQSIRLFMRTGSWWSFNPETNCLLNVPFGGTTVVRPLVEDSTSVTAVVTNGHLKMAGMHFGACDYDRLPNEVTVAKPNVLIALKMVKRQSYGTNSGVAIYHRYKAGNYRSPPITADIELALLR

SEQ ID NO: 453 - DNA, 654 bp, Middle East Respiratory Syndrome virus
atgtctaatatgacgcaactcactgaggcgcagattattgccattattaaagactggaactttgcatggtccctgatctttctcttaattactatcgtactacagtatggatacccatcccgtagtatgactgtctatgtctttaaaatgtttgttttatggctcctatggccatcttccatggcgctatcaatatttagcgccatttatccaattgatctagcttcccagataatctctggcattgtagcagctgtttcagctatgatgtggatttcctactttgtgcagagtatccggctgtttatgagaactggatcatggtggtcattcaatcctgagactaattgccttttgaacgttccatttggtggtacaactgtcgtacgtccactcgtagaggactccaccagtgtaactgctgttgtaaccaatggccacctcaaaatggctggcatgcatttcggtgcttgtgactacgacagacttcctaatgaagtcaccgtggccaaacccaatgtgctgattgctttaaaaatggtgaagcggcaaagctacggaactaattccggcgttgccatttaccatagatataaggcaggtaattacaggagtccgcctattacggcggatattgaacttgcattgcttcga

SEQ ID NO: 454 - RNA, 654 nt, Middle East Respiratory Syndrome virus
augucuaauaugacgcaacucacugaggcgcagauuauugccauuauuaaagacuggaacuuugcauggucccugaucuuucucuuaauuacuaucguacuacaguauggauacccaucccguaguaugacugucuaugucuuuaaaauguuuguuuuauggcuccuauggccaucuuccauggcgcuaucaauauuuagcgccauuuauccaauugaucuagcuucccagauaaucucuggcauuguagcagcuguuucagcuaugauguggauuuccuacuuugugcagaguauccggcuguuuaugagaacuggaucaugguggucauucaauccugagacuaauugccuuuugaacguuccauuuggugguacaacugucguacguccacucguagaggacuccaccaguguaacugcuguuguaaccaauggccaccucaaaauggcuggcaugcauuucggugcuugugacuacgacagacuuccuaaugaagucaccguggccaaacccaaugugcugauugcuuuaaaaauggugaagcggcaaagcuacggaacuaauuccggcguugccauuuaccauagauauaaggcagguaauuacaggaguccgccuauuacggcggauauugaacuugcauugcuucga

SEQ ID NO: 455 - DNA, 657 bp, Artificial Sequence
  Codon optimised DNA encoding MERS CoV M
atgagcaacatgacccagctgacagaggcccagatcattgccatcatcaaggactggaacttcgcttggagcctgatcttcctgctgatcaccatcgtgctgcagtacggctaccccagcagatccatgaccgtgtacgtgttcaagatgttcgtcctgtggctgctgtggcccagctctatggccctgagcatcttcagcgccatctatcccatcgacctggccagccagatcatctctggaatcgtggccgccgtgtccgccatgatgtggatcagctacttcgtgcagagcatccggctgttcatgagaaccggcagctggtggtccttcaatcccgagacaaactgcctgctgaacgtgccctttggcggcactacagtcgtcagacccctggtggaagatagcacctctgtgaccgccgtggtcaccaatggccacctgaaaatggccggcatgcacttcggcgcctgcgactatgacagactgcccaacgaagtgaccgtggccaagcctaatgtgctgatcgccctgaagatggtcaagcggcagagctacggcaccaattctggcgtggccatctaccacagatacaaggccggcaactacagaagccctcctatcaccgccgacatcgagctggctctgctgagatga

SEQ ID NO: 456 - RNA, 657 nt, Artificial Sequence
  Codon optimised RNA encoding MERS CoV M
augagcaacaugacccagcugacagaggcccagaucauugccaucaucaaggacuggaacuucgcuuggagccugaucuuccugcugaucaccaucgugcugcaguacggcuaccccagcagauccaugaccguguacguguucaagauguucguccuguggcugcuguggcccagcucuauggcccugagcaucuucagcgccaucuaucccaucgaccuggccagccagaucaucucuggaaucguggccgccguguccgccaugauguggaucagcuacuucgugcagagcauccggcuguucaugagaaccggcagcuggugguccuucaaucccgagacaaacugccugcugaacgugcccuuuggcggcacuacagucgucagaccccugguggaagauagcaccucugugaccgccguggucaccaauggccaccugaaaauggccggcaugcacuucggcgccugcgacuaugacagacugcccaacgaagugaccguggccaagccuaaugugcugaucgcccugaagauggucaagcggcagagcuacggcaccaauucuggcguggccaucuaccacagauacaaggccggcaacuacagaagcccuccuaucaccgccgacaucgagcuggcucugcugagauga

SEQ ID NO: 457 - RNA, 712 nt, Artificial Sequence
  RNA construct
cggagacggcgcagaagaagaggaucuggcgaaggcagaggcagccugcuuacauguggcgacguggaagagaaccccggaccuaugcaccagaaacggaccgccauguuccaggauccucaagagaggcccagaaagcugccucagcuguguaccgagcugcagaccaccauccacgacaucauccuggaaugcguguacugcaagcagcagcuccugcggagagagguguacgauuucgccuuccgggaccugugcaucguguacagagauggcaaccccuacgccgugugcgacaagugccugaaguucuacagcaagaucagcgaguaccggcacuacugcuacagccuguacggcaccacacuggaacagcaguacaacaagccccugugcgaccugcugauccggugcaucaacugccagaaaccucugugccccgaggaaaagcagcggcaccuggacaagaagcagcgguuccacaacaucagaggccgguggaccggcagaugcaugagcuguugucggagcagcagaaccagacgggaaacccagcugugagcggccgcgaauuggcaagcugcuuacauagaacucgcggcgauuggcaugccgccuuaaaauuuuuauuuuauuuuucuuuucuuuuccgaaucggauuuuguuuuuaauauuucaaaaaaaaaaaaaaaaaaaaaaaaaaaaaaaaaaa

SEQ ID NO: 458 - DNA, 712 bp, Artificial Sequence
  Nucleic acid sequence encoding RNA construct
cggagacggcgcagaagaagaggatctggcgaaggcagaggcagcctgcttacatgtggcgacgtggaagagaaccccggacctatgcaccagaaacggaccgccatgttccaggatcctcaagagaggcccagaaagctgcctcagctgtgtaccgagctgcagaccaccatccacgacatcatcctggaatgcgtgtactgcaagcagcagctcctgcggagagaggtgtacgatttcgccttccgggacctgtgcatcgtgtacagagatggcaacccctacgccgtgtgcgacaagtgcctgaagttctacagcaagatcagcgagtaccggcactactgctacagcctgtacggcaccacactggaacagcagtacaacaagcccctgtgcgacctgctgatccggtgcatcaactgccagaaacctctgtgccccgaggaaaagcagcggcacctggacaagaagcagcggttccacaacatcagaggccggtggaccggcagatgcatgagctgttgtcggagcagcagaaccagacgggaaacccagctgtgagcggccgcgaattggcaagctgcttacatagaactcgcggcgattggcatgccgccttaaaatttttattttatttttcttttcttttccgaatcggattttgtttttaatatttcaaaaaaaaaaaaaaaaaaaaaaaaaaaaaaaaaaa

SEQ ID NO: 459 - DNA, 2520 bp, Artificial Sequence
  Recombinant vector
cggagacggcgcagaagaagaggatctggcgaaggcagaggcagcctgcttacatgtggcgacgtggaagagaaccccggacctatgcaccagaaacggaccgccatgttccaggatcctcaagagaggcccagaaagctgcctcagctgtgtaccgagctgcagaccaccatccacgacatcatcctggaatgcgtgtactgcaagcagcagctcctgcggagagaggtgtacgatttcgccttccgggacctgtgcatcgtgtacagagatggcaacccctacgccgtgtgcgacaagtgcctgaagttctacagcaagatcagcgagtaccggcactactgctacagcctgtacggcaccacactggaacagcagtacaacaagcccctgtgcgacctgctgatccggtgcatcaactgccagaaacctctgtgccccgaggaaaagcagcggcacctggacaagaagcagcggttccacaacatcagaggccggtggaccggcagatgcatgagctgttgtcggagcagcagaaccagacgggaaacccagctgtgagcggccgcgaattggcaagctgcttacatagaactcgcggcgattggcatgccgccttaaaatttttattttatttttcttttcttttccgaatcggattttgtttttaatatttcaaaaaaaaaaaaaaaaaaaaaaaaaaaaaaaaaaacgcgtcgaggggaattaattcttgaagacgaaagggccaggtggcacttttcggggaaatgtgcgcggaacccctatttgtttatttttctaaatacattcaaatatgtatccgctcatgagacaataaccctgataaatgcttcaataatattgaaaaaggaagagtatgagtattcaacatttccgtgtcgcccttattcccttttttgcggcattttgccttcctgtttttgctcacccagaaacgctggtgaaagtaaaagatgctgaagatcagttgggtgcacgagtgggttacatcgaactggatctcaacagcggtaagatccttgagagttttcgccccgaagaacgttttccaatgatgagcacttttaaagttctgctatgtggcgcggtattatcccgtgttgacgccgggcaagagcaactcggtcgccgcatacactattctcagaatgacttggttgagtactcaccagtcacagaaaagcatcttacggatggcatgacagtaagagaattatgcagtgctgccataaccatgagtgataacactgcggccaacttacttctgacaacgatcggaggaccgaaggagctaaccgcttttttgcacaacatgggggatcatgtaactcgccttgatcgttgggaaccggagctgaatgaagccataccaaacgacgagcgtgacaccacgatgcctgtagcaatggcaacaacgttgcgcaaactattaactggcgaactacttactctagcttcccggcaacaattaatagactggatggaggcggataaagttgcaggaccacttctgcgctcggcccttccggctggctggtttattgctgataaatctggagccggtgagcgtgggtctcgcggtatcattgcagcactggggccagatggtaagccctcccgtatcgtagttatctacacgacggggagtcaggcaactatggatgaacgaaatagacagatcgctgagataggtgcctcactgattaagcattggtaactgtcagaccaagtttactcatatatactttagattgatttaaaacttcatttttaatttaaaaggatctaggtgaagatcctttttgataatctcatgaccaaaatcccttaacgtgagttttcgttccactgagcgtcagaccccgtagaaaagatcaaaggatcttcttgagatcctttttttctgcgcgtaatctgctgcttgcaaacaaaaaaaccaccgctaccagcggtggtttgtttgccggatcaagagctaccaactctttttccgaaggtaactggcttcagcagagcgcagataccaaatactgtccttctagtgtagccgtagttaggccaccacttcaagaactctgtagcaccgcctacatacctcgctctgctaatcctgttaccagtggctgctgccagtggcgataagtcgtgtcttaccgggttggactcaagacgatagttaccggataaggcgcagcggtcgggctgaacggggggttcgtgcacacagcccagcttggagcgaacgacctacaccgaactgagatacctacagcgtgagcattgagaaagcgccacgcttcccgaagggagaaaggcggacaggtatccggtaagcggcagggtcggaacaggagagcgcacgagggagcttccagggggaaacgcctggtatctttatagtcctgtcgggtttcgccacctctgacttgagcgtcgatttttgtgatgctcgtcaggggggcggagcctatggaaaaacgccagcaacgcgagctc
